(19) United States
(12) Patent Application Publication
(10) Pub. No.: US 2018/0244785 A1
(43) Pub. Date: Aug. 30, 2018

(54) ANTI-FGFR ANTIBODIES AND METHODS OF USE

(71) Applicant: Merrimack Pharmaceuticals, Inc., Cambridge, MA (US)

(72) Inventors: Tamara DAKE, Sharon, MA (US); Gregory J. FINN, Watertown, MA (US); Melissa GEDDIE, Arlington, MA (US); Yasmin HASHAMBHOY-RAMSAY, Watertown, MA (US); Marco MUDA, Somerville, MA (US); Birgit M. SCHOEBERL, Cambridge, MA (US)

(21) Appl. No.: 15/864,764

(22) Filed: Jan. 8, 2018

Related U.S. Application Data
(60) Provisional application No. 62/555,859, filed on Sep. 8, 2017.
(60) Provisional application No. 62/478,943, filed on Mar. 30, 2017.
(60) Provisional application No. 62/444,174, filed on Jan. 9, 2017.

(51) Int. Cl. C07K 16/28; G01N 33/574; A61P 35/00; A61K 47/68

(52) U.S. Cl. CPC C07K 16/2863; G01N 33/57492; A61P 35/00; C07K 2317/31; C07K 2317/92; G01N 2333/705; C07K 2317/21; A61K 47/6849

(57) ABSTRACT

Anti-FGFR antibodies which bind to particular isoforms of FGFR1-4, therapeutic compositions comprising the anti-FGFR antibodies, and methods of using such antibodies and compositions in the treatment of FGFR-related disorders (e.g., cancer) are disclosed.

### RELATED INFORMATION

[0001] This patent application claims the benefit of U.S. Provisional Patent Application Ser. No. 62/444174, filed Jan. 9, 2017, U.S. Provisional Patent Application Ser. No. 62/478943, filed Mar. 30, 2017, and U.S. Provisional Patent Application Ser. No. 62/555859, filed Sep. 8, 2017. The entire contents of the above-referenced provisional patent applications are incorporated herein by reference.

### BACKGROUND

[0002] In humans, the fibroblast growth factor (FGF) family of ligands comprises 22 genes. FGF family members share amino acid sequence identity ranging from 16 to 65%, and have been shown to regulate a variety of responses ranging from embryo morphogenesis, wound healing, control of nervous system, metabolism, skeletal function, tumor angiogenesis, and tumor proliferation.

[0003] The FGF cognate-receptor family includes four genes that, like all tyrosine kinase receptors, are composed of an extracellular ligand binding domain, a single transmembrane α-helix, and a cytoplasmic tyrosine kinase domain. The FGFR extracellular domain is composed of up to three immunoglobulin-like domains (D 1-3), with D2 and D3 comprising the ligand binding portion. In addition, D2 domain also includes a positively charged region that serves as a binding domain for heparan sulfate proteoglycan (HSPG), and one characteristic of the FGF receptor-ligand signaling system is the formation of a ternary complex between ligand, receptor and HSPG. Another critical distinctive feature among members of the FGF receptor (FGFR) family is the extensive use of alternative splicing to generate multiple isoforms. Splicing variants have been identified for all four mammalian FGFRs, and the most characterized variants are the splicing variations generated within the D3 domain. In fact, the alternative usage of two exons within FGF receptor genes 1, 2 and 3 (but not FGFR4) generate two receptor variants named “c” and “b” respectively. The alternative splicing of the D3 domain into the b or c forms confers this system additional complexity.

[0004] Among numerous reports describing the role of various FGFRs in cancer, several have identified FGFR1 as a cancer driver in both blood and solid tumors. For example, chromosomal translocation and genetic fusion between intracellular kinase domain of FGFR1 and various genes has been found to cause 8p11 myelo-proliferative syndrome (Knights et al., Pharmacol Ther 2010; 125:105-17), and the FGFR1 gene locus has been found to be amplified in approximately 10% of breast cancer patients and was recently shown to drive proliferation and tamoxifen resistance in various cancer cell lines (Turner et al., Cancer Res 2010; 70:2085-94). Finally, FGFR1 amplification was found in 20% of squamous cell lung cancer patient (Weiss et al., Sci Transl Med 2010; 2:62ra93). However, the development of FGFR1 antagonistic antibodies have stalled due to anorexic side effects associated with anti-FGFR1 monoclonal antibodies in animal models.

[0005] Given that FGFR is a potential target for anti-cancer therapy, novel agents and methods of inhibiting FGFR activity that are not associated with debilitating side effects are desirable. The present disclosure addresses this unmet need.

### SUMMARY

[0006] Provided herein are isolated antibodies, such as monoclonal antibodies (e.g., human monoclonal antibodies) that specifically bind to particular isoforms of FGFR proteins and have desirable properties, such as high binding affinity to FGFR IIIc isoforms, and the ability to block the binding of FGF ligand to FGFR proteins, inhibit FGFR signaling, and inhibit FGF-mediated cell viability. The antibodies described herein can be used to inhibit tumor growth, treat cancer (e.g., FGFR-expressing cancers), and detect FGFR proteins in a sample.

[0007] Accordingly, in one aspect, provided herein are antibodies (e.g., isolated monoclonal antibodies), or antigen-binding portions thereof, which bind to human FGFR1c, FGFR2c, FGFR3c, and/or FGFR4. In some embodiments, the antibodies do not bind to FGFR1b, FGFR2b, and/or FGFR3b.

[0008] In another aspect, provided herein are isolated monoclonal antibodies, or antigen-binding portions thereof, which specifically bind to FGFR1c, FGFR2c, FGFR3c, and/or FGFR4, and comprise the three variable heavy chain CDRs and the three light chain CDRs that are in the heavy and light chain variable region pairs selected from the group consisting of SEQ ID NOs: 29 and 30; 40 and 41; 51 and 52; 62 and 63; 73 and 74; 84 and 85; 95 and 96; 106 and 107; 117 and 118; 128 and 129; 139 and 140; 150 and 151; 161 and 162; 172 and 173; 183 and 184; 194 and 195; 204 and 205; 214 and 215; 224 and 225; 234 and 235; 244 and 245; 254 and 255; 264 and 265; 274 and 275; 284 and 285; 294 and 295; 304 and 305; 314 and 315; 324 and 325; 334 and 335; 344 and 345; 354 and 355; 364 and 365; 374 and 375; 384 and 385; 394 and 395; 404 and 405; 414 and 415; 424 and 425; 434 and 435; 444 and 445; 454 and 455; 464 and 465; 474 and 475; 484 and 485; 494 and 495; 504 and 505; 514 and 515; 524 and 525; 534 and 535; 544 and 545; 554 and 555; 564 and 565; 574 and 575; 584 and 585; 594 and 595; 604 and 605; 614 and 615; 624 and 625; 634 and 635; 644 and 645; 654 and 655; 664 and 665; 674 and 675; 684 and 685; 694 and 695; 704 and 705; 714 and 715; 724 and 725; 734 and 735; 744 and 745; 754 and 755; 764 and 765; 774 and 775; 784 and 785; 794 and 795; 804 and 805; 814 and 815; 824 and 825; 834 and 835; 844 and 845; 854 and 855; 864 and 865; 874 and 875; 884 and 885; 894 and 895; 904 and 905; 914 and 915; 924 and 925; 934 and 935; 944 and 945; 954 and 955; 964 and 965; 974 and 975; 984 and 985; 994 and 995; 1004 and 1005; 1014 and 1015; 1024 and 1025; 1034 and 1035; 1044 and 1045; 1054 and 1055; 1064 and 1065; 1074 and 1075; 1084 and 1085; 1094 and 1095; and 1104 and 1105, wherein the antibodies bind to human FGFR1c, FGFR2c, FGFR3c, and/or FGFR4. In some embodiments, the antibodies do not bind to FGFR1b, FGFR2b, and/or FGFR3b. In some embodiments, the CDRs are defined according to the Kabat numbering system. In some embodiments, the CDRs are defined according to the IMGT numbering system.

[0009] In another aspect, provided herein are isolated monoclonal antibodies, or antigen-binding portions thereof, which specifically bind to FGFR1c, FGFR2c, FGFR3c, and/or FGFR4, and comprise heavy chain CDR1, CDR2, and CDR3 sequences and light chain CDR1, CDR2, and CDR3 sequences selected from the group consisting of SEQ ID NOs: 23-25 and 26-28; 34-36 and 37-39; 45-47 and 48-50; 56-58 and 59-61, 67-69 and 70-72; 78-80 and 81-83; 89-91 and 92-94; 100-102 and 103-105; 111-113 and 114-116; 122-124 and 125-127; 133-135 and 136-138; 144-146 and 147-149; 155-157 and 158-160, 166-168 and 169-171; 177-179 and 180-182; 188-190 and 191-193; 198-200 and 201-203; 208-210 and 211-213; 218-220 and 221-223; 228-230 and 231-233; 238-240 and 241-243; 248-250 and 251-253; 258-260 and 261-263; 268-270 and 271-273; 278-280 and 281-283; 288-290 and 291-293; 298-300 and 301-303; 308-310 and 311-313; 318-320 and 321-323; 228-330 and 331-333; 338-340 and 341-343; 348-350 and 351-353; 358-360 and 361-363; 368-370 and 371-373; 378-380 and 381-383; 388-390 and 391-393; 398-400 and 401-403; 408-410 and 411-413; 418-420 and 421-423; 428-430 and 431-433; 438-440 and 441-443; 448-450 and 451-453; 458-460 and 461-463; 468-470 and 471-473; 478-480 and 481-483; 488-490 and 491-493; 498-500 and 501-503; 508-510 and 511-513; 518-520 and 521-523; 528-530 and 531-533; 538-540 and 541-543; 548-550 and 551-553; 558-560 and 561-563; 568-570 and 571-573; 578-580 and 581-583; 588-590 and 591-593; 598-600 and 601-603; 608-610 and 611-613; 618-620 and 621-623; 628-630 and 631-633; 638-640 and 641-643; 648-650 and 651-653; 658-660 and 661-663; 668-670 and 671-673; 678-680 and 681-683; 688-690 and 691-693; 698-700 and 701-703; 708-710 and 711-713; 718-720 and 721-723; 728-730 and 731-733; 738-740 and 741-743; 748-750 and 751-753; 758-760 and 761-763; 768-770 and 771-773; 778-780 and 781-783; 788-790 and 791-793; 798-800 and 801-803; 808-810 and 811-813; 818-820 and 821-823; 828-830 and 831-833; 838-840 and 841-843; 848-850 and 851-853; 858-860 and 861-863; 868-870 and 871-873; 878-880 and 881-883; 888-890 and 891-893; 898-900 and 901-903; 908-910 and 911-913; 918-920 and 921-923; 928-930 and 931-933; 938-940 and 941-943; 948-950 and 951-953; 958-960 and 961-963; 968-970 and 971-973; 978-980 and 981-983; 988-990 and 991-993; 998-1000 and 1001-1003; 1008-1010 and 1011-1013; 1018-1020 and 1021-1023; 1028-1030 and 1031-1033; 1038-1040 and 1041-1043; 1048-1050 and 1051-1053; 1058-1060 and 1061-1063; 1068-1070 and 1071-1073; 1078-1080 and 1081-1083; 1088-1090 and 1091-1093; and 1098-1100 and 1101-1103. In some embodiments, the antibodies do not bind to FGFR1b, FGFR2b, and/or FGFR3b.

[0010] In another aspect, provided herein are isolated monoclonal antibodies, or antigen-binding portions thereof, which specifically bind to FGFR1c, FGFR2c, FGFR3c, and/or FGFR4, and comprise IMGT heavy chain CDR1, CDR2, and CDR3 sequences and IMGT light chain CDR1, CDR2, and CDR3 sequences selected from the group consisting of SEQ ID NOs: 1544-1546 and 1547-1549; 1550-1552 and 1553-1555; 1556-1558 and 1559-1561; 1562-1564 and 1565-1567; 1568-1570 and 1571-1573; ;1574-1576 and 1577-1579; 1580-1582 and 1583-1585; 1586-1588 and 1589-1591; 1592-1594 and 1595-1597; 1598-1600 and 1601-1603; 1604-1606 and 1607-1609; 1610-1612 and 1613-1615; 1616-1618 and 1619-1621; 1622-1624 and 1625-1627; 1628-1630 and 1631-1633; 1634-1636 and 1637-1639; 1640-1642 and 1643-1645; 1646-1648 and 1649-1651; 1652-1654 and 1655-1657; 1658-1660 and 1661-1663; 1664-1666 and 1667-1669; 1670-1672 and 1673-1675; 1676-1678 and 1679-1681; 1682-1684 and 1685-1687; 1688-1690 and 1691-1693; 1694-1696 and 1697-1699; 1700-1702 and 1703-1705; 1706-1708 and 1709-1711; 1712-1714 and 1715-1717; 1718-1720 and 1721-1723; 1724-1726 and 1727-1729; 1730-1732 and 1733-1735; 1736-1738 and 1739-1741; 1742-1744 and 1745-1747; 1748-1750 and 1751-1753; 1754-1756 and 1757-1759; 1760-1762 and 1763-1765; 1766-1768 and 1769-1771; 1772-1774 and 1775-1777; 1778-1780 and 1781-1783; 1784-1786 and 1787-1789; 1790-1792 and 1793-1795; 1796-1798 and 1799-1801; 1802-1804 and 1805-1807; 1808-1810 and 1811-1813; 1814-1816 and 1817-1819; 1820-1822 and 1823-1825; 1826-1828 and 1829-1831; 1832-1834 and 1835-1837; 1838-1840 and 1841-1843; 1844-1846 and 1847-1849; 1850-1852 and 1853-1855; 1856-1858 and 1859-1861; 1862-1864 and 1865-1867; 1868-1870 and 1871-1873; 1874-1876 and 1877-1879; 1880-1882 and 1883-1885; 1886-1888 and 1889-1891; 1892-1894 and 1895-1897; 1898-1900 and 1901-1903; 1904-1906 and 1907-1909; 1910-1912 and 1913-1915; 1916-1918 and 1919-1921; 1922-1924 and 1925-1927; 1928-1930 and 1931-1933; 1934-1936 and 1937-1939; 1940-1942 and 1943-1945; 1946-1948 and 1949-1951; 1952-1954 and 1955-1957; 1958-1960 and 1961-1963; 1964-1966 and 1967-1969; 1970-1972 and 1973-1975; 1976-1978 and 1979-1981; 1982-1984 and 1985-1987; 1988-1990 and 1991-1993; 1994-1996 and 1997-1999; 2000-2002 and 2003-2005; 2006-2008 and 2009-2011; 2012-2014 and 2015-2017; 2018-2020 and 2021-2023; 2024-2026 and 2027-2029; 2030-2032 and 2033-2035; 2036-2038 and 2039-2041; 2042-2044 and 2045-2047; 2048-2050 and 2051-2053; 2054-2056 and 2057-2059; 2060-2062 and 2063-2065; 2066-2068 and 2069-2071; 2072-2074 and 2075-2077; 2078-2080 and 2081-2083;2084-2086 and 2087-2089; 2090-2092 and 2093-2095; 2096-2098 and 2099-2101; 2102-2104 and 2105-2107; 2108-2110 and 2111-2113; 2114-2116 and 2117-2119; 2120-2122 and 2123-2125; 2126-2128 and 2129-2131; 2132-2134 and 2135-2137; 2138-2140 and 2141-2143; 2144-2146 and 2147-2149; 2150-2152 and 2153-2155; 2156-2158 and 2159-2161; 2162-2164 and 2165-2167; 2168-2170 and 2171-2173; 2174-2176 and 2177-2179; and 2180-2182 and 2183-2185. In some embodiments, the antibodies do not bind to FGFR1b, FGFR2b, and/or FGFR3b.

[0011] In another aspect, provided herein are isolated monoclonal antibodies, or antigen-binding portions thereof, which bind to FGFR1c, FGFR2c, FGFR3c, and/or FGFR4, and comprise heavy and light chain variable regions, wherein the heavy chain variable region comprises an amino acid sequence which is at least 90%, 95%, 98%, 99%, or 100% identical to the amino acid sequence selected from the group consisting of SEQ ID NOs: 29; 40; 51; 62; 73; 84; 95; 106; 117; 128; 139; 150; 161; 172; 183; 194; 204; 214; 224; 234; 244; 254; 264; 274; 284; 294; 304; 314; 324; 334; 344; 354; 364; 374; 384; 394; 404; 414; 424; 434; 444; 454; 464; 474; 484; 494; 504; 514; 524; 534; 544; 554; 564; 574; 584; 594; 604; 614; 624; 634; 644; 654; 664; 674; 684; 694; 704; 714; 724; 734; 744; 754; 764; 774; 784; 794; 804; 814; 824; 834; 844; 854; 864; 874; 884 ; 894; 904; 914; 924; 934; 944; 954; 964; 974; 984; 994; 1004; 1014; 1024; 1034; 1044; 1054; 1064; 1074; 1084; 1094; 1104; 1111; and 1115, wherein the antibodies bind to human FGFR1c, FGFR2c, FGFR3c, and/or FGFR4. In some embodiments, the antibodies do not bind to FGFR1b, FGFR2b, and/or FGFR3b. In some embodiments, the heavy chain variable region is paired with a light chain variable region comprising an amino acid sequence selected from the group consisting of SEQ ID NOs: 1119, 1123, 1127, 1131; 1135; 1139; 1143; 1147; 1151; 1155; 1159; 1163; and 1167.

[0012] In another aspect, provided herein are isolated monoclonal antibodies, or antigen-binding portions thereof, which bind to FGFR1c, FGFR2c, FGFR3c, and/or FGFR4, and comprise heavy and light chain variable regions, wherein the heavy chain variable region comprises heavy chain CDR1, CDR2, and CDR3 sequences set forth in SEQ ID NOs: 177-179; 1108-1110; or 1112-1114. In some embodiments, the antibodies do not bind to FGFR1b, FGFR2b, and/or FGFR3b. In some embodiments, the heavy chain variable region is paired with a light chain variable region comprising light chain CDR1, CDR2, and CDR3 sequences selected from the group consisting of SEQ ID NOs: 180-182; 1116-1118; 1120-1122; 1124-1126; 1128-1130; 1132-1134; 1136-1138; 1140-1142; 1144-1146; 1148-1150; 1152-1154; 1156-1158; 1160-1162; and 1164-1166.

[0013] In another aspect, provided herein are isolated monoclonal antibodies, or antigen-binding portions thereof, which bind to FGFR1c, FGFR2c, FGFR3c, and/or FGFR4, and comprise heavy and light chain variable regions, wherein the heavy chain variable region comprises IMGT heavy chain CDR1, CDR2, and CDR3 sequences set forth in SEQ ID NOs: 1628-1630; 2186-2188; or 2189-2191. In some embodiments, the antibodies do not bind to FGFR1b, FGFR2b, and/or FGFR3b. In some embodiments, the heavy chain variable region is paired with a light chain variable region comprising IMGT light chain CDR1, CDR2, and CDR3 sequences selected from the group consisting of SEQ ID NOs: 1631-1633; 2192-2194; 2195-2197; 2198-2200; 2201-2203; 2204-2206; 2207-2209; 2210-2212; 2213-2215; 2216-2218; 2219-2221; 2222-2224; 2225-2227; and 2228-2230.

[0014] In another aspect, provided herein are isolated monoclonal antibodies, or antigen-binding portions thereof, which bind to FGFR1c, FGFR2c, FGFR3c, and/or FGFR4, and comprise heavy and light chain variable regions, wherein the light chain variable region comprises an amino acid sequence which is at least 90%, 95%, 98%, 99%, or 100% identical to the amino acid sequence selected from the group consisting of SEQ ID NOs: 30; 41; 52; 63; 74; 85; 96; 107; 118; 129; 140; 151; 162; 173; 184; 195; 205; 215; 225; 235; 245; 255; 265; 275; 285; 295; 305; 315; 325; 335; 345; 355; 365; 375; 385; 395; 405; 415; 425; 435; 445; 455; 465; 475; 485; 495; 505; 515; 525; 535; 545; 555; 565; 575; 585; 595; 605; 615; 625; 635; 645; 655; 665; 675; 685; 695; 705; 715; 725; 735; 745; 755; 765; 775; 785; 795; 805; 815; 825; 835; 845; 855; 865; 875; 885; 895; 905; 915; 925; 935; 945; 955; 965; 975; 985; 995; 1005; 1015; 1025; 1035; 1045; 1055; 1065; 1075; 1085; 1095; 1105; 1119; 1123; 1127; 1131; 1135; 1139; 1143; 1147; 1151; 1155; 1159; 1163; and 1167, wherein the antibodies bind to human FGFR1c, FGFR2c, FGFR3c, and/or FGFR4. In some embodiments, the antibodies do not bind to FGFR1b, FGFR2b, and/or FGFR3b. In some embodiments, the light chain variable region is paired with a heavy chain variable region comprising the amino acid sequence of SEQ ID NO: 1111 or 1115.

[0015] In another aspect, provided herein are isolated monoclonal antibodies, or antigen-binding portions thereof, which bind to FGFR1c, FGFR2c, FGFR3c, and/or FGFR4, and comprise heavy and light chain variable regions, wherein the light chain variable region comprises light chain CDR1, CDR2, and CDR3 sequences set forth in SEQ ID NOs: 180-182; 1116-1118; 1120-1122; 1124-1126; 1128-1130; 1132-1134; 1136-1138; 1140-1142; 1144-1146; 1148-1150; 1152-1154; 1156-1158; 1160-1162; and 1164-1166. In some embodiments, the antibodies do not bind to FGFR1b, FGFR2b, and/or FGFR3b. In some embodiments, the light chain variable region is paired with a heavy chain variable region comprising heavy chain CDR1, CDR2, and CDR3 sequences selected from the group consisting of SEQ ID NOs: 177-179; 1108-1110; or 1112-1114.

[0016] In another aspect, provided herein are isolated monoclonal antibodies, or antigen-binding portions thereof, which bind to FGFR1c, FGFR2c, FGFR3c, and/or FGFR4, and comprise heavy and light chain variable regions, wherein the light chain variable region comprises IMGT light chain CDR1, CDR2, and CDR3 sequences set forth in SEQ ID NOs: 1631-1633; 2192-2194; 2195-2197; 2198-2200; 2201-2203; 2204-2206; 2207-2209; 2210-2212; 2213-2215; 2216-2218; 2219-2221; 2222-2224; 2225-2227; and 2228-2230. In some embodiments, the antibodies do not bind to FGFR1b, FGFR2b, and/or FGFR3b. In some embodiments, the light chain variable region is paired with a heavy chain variable region comprising IMGT heavy chain CDR1, CDR2, and CDR3 sequences selected from the group consisting of SEQ ID NOs: 1628-1630; 2186-2188; or 2189-2191.

[0017] In another aspect, provided herein are isolated monoclonal antibodies, or antigen-binding portions thereof, which bind to FGFR1c, FGFR2c, FGFR3c, and/or FGFR4, and comprises heavy and light chain variable region sequences which are at least 90%, 95%, 98%, 99%, or 100% identical to the amino acid sequences selected from the group consisting of SEQ ID NOs: 29 and 30; 40 and 41; 51 and 52; 62 and 63; 73 and 74; 84 and 85; 95 and 96; 106 and 107; 117 and 118; 128 and 129; 139 and 140; 150 and 151; 161 and 162; 172 and 173; 183 and 184; 194 and 195; 204 and 205; 214 and 215; 224 and 225; 234 and 235; 244 and 245; 254 and 255; 264 and 265; 274 and 275; 284 and 285; 294 and 295; 304 and 305; 314 and 315; 324 and 325; 334 and 335; 344 and 345; 354 and 355; 364 and 365; 374 and 375; 384 and 385; 394 and 395; 404 and 405; 414 and 415; 424 and 425; 434 and 435; 444 and 445; 454 and 455; 464 and 465; 474 and 475; 484 and 485; 494 and 495; 504 and 505; 514 and 515; 524 and 525; 534 and 535; 544 and 545; 554 and 555; 564 and 565; 574 and 575; 584 and 585; 594 and 595; 604 and 605; 614 and 615; 624 and 625; 634 and 635; 644 and 645; 654 and 655; 664 and 665; 674 and 675; 684 and 685; 694 and 695; 704 and 705; 714 and 715; 724 and 725; 734 and 735; 744 and 745; 754 and 755; 764 and 765; 774 and 775; 784 and 785; 794 and 795; 804 and 805; 814 and 815; 824 and 825; 834 and 835; 844 and 845; 854 and 855; 864 and 865; 874 and 875; 884 and 885; 894 and 895; 904 and 905; 914 and 915; 924 and 925; 934 and 935; 944 and 945; 954 and 955; 964 and 965; 974 and 975; 984 and 985; 994 and 995; 1004 and 1005; 1014 and 1015; 1024 and 1025; 1034 and 1035; 1044 and 1045; 1054 and 1055; 1064 and 1065; 1074 and 1075; 1084 and 1085; 1094 and 1095; and 1104 and 1105, wherein the antibodies bind to human FGFR1c, FGFR2c, FGFR3c, and/or FGFR4. In some embodiments, the antibodies do not bind to FGFR1b, FGFR2b, and/or FGFR3b.

[0018] In another aspect, provided herein are isolated monoclonal antibodies, or antigen-binding portions thereof, which bind to FGFR1c, FGFR2c, FGFR3c, and/or FGFR4, comprising heavy and light chains, wherein the heavy chains comprise or consist of an amino acid sequence which is at least 90%, 95%, 98%, 99%, or 100% identical to the amino acid sequences selected from the group consisting of SEQ ID NO: 32; 43; 54; 65; 76; 87; 98; 109; 120; 131; 142; 153; 164; 175; 186; 196; 206; 216; 226; 236; 246; 256; 266; 276; 286; 296; 306; 316; 326; 336; 346; 356; 366; 376; 386; 396; 406; 416; 426; 436; 446; 456; 466; 476; 486; 496; 506 516; 526; 536; 546; 556; 566; 576; 586; 596; 606; 616; 626; 636; 646; 656; 666; 676; 686; 696; 706; 716; 726; 736; 746; 756; 766; 776; 786; 796; 806; 816; 826; 836; 846; 856; 866; 876; 886; 896; 906; 916; 926; 936; 946; 956; 966; 976; 986; 996; 1006; 1016; 1026; 1036; 1046; 1056; 1066; 1076; 1086; 1096; and 1106, wherein the antibodies bind to human FGFR1c, FGFR2c, FGFR3c, and/or FGFR4. In some embodiments, the antibodies do not bind to FGFR1b, FGFR2b, and/or FGFR3b.

[0019] In another aspect, provided herein are isolated monoclonal antibodies, or antigen-binding portions thereof, which bind to FGFR1c, FGFR2c, FGFR3c, and/or FGFR4, comprising heavy and light chains, wherein the light chain comprises or consists of an amino acid sequence which is at least 90%, 95%, 98%, 99%, or 100% identical to an amino acid sequence selected from the group consisting of SEQ ID NO: 33; 44; 55; 66; 77; 88; 99; 110; 121; 132; 143; 154; 165; 176; 186; 196; 206; 216; 226; 236; 246; 256; 266; 277; 287; 297; 307; 317; 327; 337; 347; 357; 367; 377; 387; 397; 407; 417; 427; 437; 447; 457; 467; 477; 487; 497; 507; 517; 527; 537; 547; 557; 567; 577; 587; 597; 607; 617; 627; 637; 647; 657; 667; 677; 687; 697; 707; 717; 727; 737; 747 757; 767; 777; 787; 797; 807; 817; 827; 837; 847; 857; 867; 877; 887; 897; 907; 917; 927; 937; 947; 957; 967; 977; 987; 997; 1007; 1017; 1027; 1037; 1047; 1057; 1067; 1077; 1087; 1097; and 1107, wherein the antibodies bind to human FGFR1c, FGFR2c, FGFR3c, and/or FGFR4. In some embodiments, the antibodies do not bind to FGFR1b, FGFR2b, and/or FGFR3b.In another aspect, provided herein are isolated monoclonal antibodies, or antigen-binding portions thereof, which bind to FGFR1c, FGFR2c, FGFR3c, and/or FGFR4, and comprises or consists of heavy and light chain sequences which are at least 90%, 95%, 98%, 99%, or 100% identical to the amino acid sequences selected from the group consisting of SEQ ID NOs: 32 and 33; 43 and 44; 54 and 55; 65 and 66; 76 and 77; 87 and 88; 98 and 99; 109 and 110; 120 and 121; 131 and 132; 142 and 143; 153 and 154; 164 and 165; 175 and 176; 186 and 187; 196 and 197; 206 and 207; 216 and 217; 226 and 227; 236 and 237; 246 and 247; 256 and 257; 266 and 267; 276 and 277; 286 and 287; 296 and 297; 306 and 307; 316 and 317; 326 and 327; 336 and 337; 346 and 347; 356 and 357; 366 and 367; 376 and 377; 386 and 387; 396 and 397; 406 and 407; 416 and 417; 426 and 427; 436 and 437; 446 and 447; 456 and 457; 466 and 467; 476 and 477; 486 and 487; 496 and 497; 506 and 507; 516 and 517; 526 and 527; 536 and 537; 546 and 547; 556 and 557; 566 and 567; 576 and 577; 586 and 587; 596 and 597; 606 and 607; 616 and 617; 626 and 627; 636 and 637; 646 and 647; 656 and 657; 666 and 667; 676 and 677; 686 and 687; 696 and 697; 706 and 707; 716 and 717; 726 and 727; 736 and 737; 746 and 747; 756 and 757; 766 and 767; 776 and 777; 786 and 787; 796 and 797; 806 and 807; 816 and 817; 826 and 827; 836 and 837; 846 and 847; 856 and 857; 866 and 867; 876 and 877; 886 and 887; 896 and 897; 906 and 907; 916 and 917; 926 and 927; 936 and 937; 946 and 947; 956 and 957; 966 and 967; 976 and 977; 986 and 987; 996 and 997; 1006 and 1007; 1016 and 1017; 1026 and 1027; 1036 and 1037; 1046 and 1047; 1056 and 1057; 1066 and 1067; 1076 and 1077; 1086 and 1087; 1096 and 1097; and 1106 and 1107, wherein the antibodies bind to human FGFR1c, FGFR2c, FGFR3c, and/or FGFR4. In some embodiments, the antibodies do not bind to FGFR1b, FGFR2b, and/or FGFR3b, wherein the antibodies bind to human FGFR1c, FGFR2c, FGFR3c, and/or FGFR4. In some embodiments, the antibodies do not bind to FGFR1b, FGFR2b, and/or FGFR3b.

[0020] In another aspect, provided herein are antibodies (e.g., isolated monoclonal antibodies), or antigen-binding portions thereof, which bind to FGFR1c, FGFR2c, FGFR3c, and/or FGFR4, and comprise heavy chain CDR1, CDR2, and CDR3 sequences [SGHT][YH]A[MI]H (SEQ ID NO: 2231), [VL]ISYDGS[NE]KYYADS[VA]KG (SEQ ID NO: 2232), and GAG[RTLQHMI]G[YLFW][TPASIM][YNFHLWRK]GPDGDFI (SEQ ID NO: 2233), respectively, and light chain CDR1, CDR2, and CDR3 sequences [TRK]SS[RQE]SL[LVI][HWYF][SRGT]DG[KNI]TY[VL][YSN] (SEQ ID NO: 2234), [EKQ][LVI]S[NS]RFS (SEQ ID NO: 2235), and MQ[YA][IVTK][EQNR][AFL]P[LW]T (SEQ ID NO: 2236), respectively.

[0021] In another aspect, provided herein are antibodies (e.g., isolated monoclonal antibodies), or antigen-binding portions thereof, which bind to FGFR1c, FGFR2c, FGFR3c, and/or FGFR4, and comprise heavy chain CDR1, CDR2, and CDR3 sequences [SG]YA[MI]H (SEQ ID NO: 2237), [VL]ISYDGSNKYYADS[VA]KG (SEQ ID NO: 2238), and GAG[RTLQHMI]G[YLFW][TPASIM][YNFHLWRK]GPDGDFI (SEQ ID NO: 2239), respectively, and light chain CDR1, CDR2, and CDR3 sequences [TRK]SS[RQE]SL[LV][HWY][SR]DG[KN]TY[VL][YS] (SEQ ID NO: 2240), [EK][LV]SNRFS (SEQ ID NO: 2241), and MQ[YA][IVT][EQ][AF]P[LW]T (SEQ ID NO: 2242), respectively.

[0022] In another aspect, provided herein are antibodies (e.g., isolated monoclonal antibodies), or antigen-binding portions thereof, which bind to FGFR1c, FGFR2c, FGFR3c, and/or FGFR4, and comprise heavy chain CDR1, CDR2, and CDR3 sequences [SG]YAMH (SEQ ID NO: 2243), VISYDGSNKYYADSVKG (SEQ ID NO: 2244), and GAG[RTLQHMI]G[YLFW][TPASIM][YNFHLWRK]GPDGDFI (SEQ ID NO: 2245), respectively, and light chain CDR1, CDR2, and CDR3 sequences [TRK]SS[RQ]SLL[HW]SDGKTY[VL]Y (SEQ ID NO: 2246), ELSNRFS (SEQ ID NO: 2247), and MQY[IV]EAPLT (SEQ ID NO: 2248), respectively.

[0023] In another aspect, provided herein are antibodies (e.g., isolated monoclonal antibodies), or antigen-binding portions thereof, which bind to FGFR1c, FGFR2c, FGFR3c, and/or FGFR4, and comprise IMGT heavy chain CDR1, CDR2, and CDR3 sequences GF[TSD]F[SGTA][SGHT][YH]A (SEQ ID NO: 2249), ISYDGS[NE]K (SEQ ID NO: 2250), and VRGAG[RTLQHMI]G[YLFW][TPASIM][YNFHLWRK]GPDGDFI (SEQ ID NO: 2251), respectively, and IMGT light chain CDR1, CDR2, and CDR3 sequences [RQE]SL[LVI][HWYF][SRGT]DG[KNI]TY (SEQ ID NO: 2252), [EKQ][LVI]S (SEQ ID NO: 2253), and MQ[YA][IVTK][EQNR][AFL]P[LW]T (SEQ ID NO: 2254), respectively.

[0024] In another aspect, provided herein are antibodies (e.g., isolated monoclonal antibodies), or antigen-binding portions thereof, which bind to FGFR1c, FGFR2c, FGFR3c, and/or FGFR4, and comprise IMGT heavy chain CDR1, CDR2, and CDR3 sequences GF[TD]F[SA][SG]YA (SEQ ID NO: 2255), ISYDGSNK (SEQ ID NO: 2256), and VRGAG[RTLQHMI]G[YLFW][TPASIM][YNFHLWRK]GPDGDFI (SEQ ID NO: 2257), respectively, and IMGT light chain CDR1, CDR2, and CDR3 sequences [RQE]SL[LV][HWY][SR]DG[KN]TY (SEQ ID NO: 2258), [EK][LV]S (SEQ ID NO: 2259), and MQ[YA][IVT][EQ][AF]P[LW]T (SEQ ID NO: 2260), respectively.

[0025] In another aspect, provided herein are antibodies (e.g., isolated monoclonal antibodies), or antigen-binding portions thereof, which bind to FGFR1c, FGFR2c, FGFR3c, and/or FGFR4, and comprise IMGT heavy chain CDR1, CDR2, and CDR3 sequences GF[TD]F[SA][SG]YA (SEQ ID NO: 2261), ISYDGSNK (SEQ ID NO: 2262), and VRGAG[RTLQHMI]G[YLFW][TPASIM][YNFHLWRK]GPDGDFI (SEQ ID NO: 2263), respectively, and IMGT light chain CDR1, CDR2, and CDR3 sequences [RQ]SLL[HW]SDGKTY (SEQ ID NO: 2264), ELS (SEQ ID NO: 2265), and MQY[IV]EAPLT (SEQ ID NO: 2266), respectively.

[0026] In another aspect, provided herein are antibodies, or antigen-binding portions thereof, which bind to the same epitope on FGFR1c, FGFR2c, FGFR3c, and/or FGFR4 as the anti-FGFR antibodies described herein.

[0027] In another aspect, provided herein are antibodies, or antigen-binding portions thereof, which compete for binding to FGFR1c, FGFR2c, FGFR3c, and/or FGFR4 with the anti-FGFR antibodies described herein.

[0028] In another aspect, provided herein are modified antibodies, or antigen-binding portions thereof, that bind to FGFR1c, wherein the antibodies exhibit increased tolerability (e.g., measured as a reduction in weight loss) as compared to an antibody comprising identical heavy and light chain variable region sequences and an IgG1 constant region when administered to a mammal (e.g., a mouse or human). In another aspect, provided herein are modified antibodies, or antigen-binding portions thereof, that bind to FGFR1c, wherein administration of the antibodies to mammals does not result in significant weight loss (e.g., weight loss of <15%, ≤10%, or ≤5%). In some embodiments, the antibodies also bind to FGFR2c, FGFR3c, and/or FGFR4. In some embodiments, the antibodies do not bind to FGFR1b, FGFR2b, and FGFR3b. In some embodiments, the reduction in weight loss when the antibody is administered to mice is about 15% or less, e.g., ≤10% or less, ≤5% or less, or lower, relative to the weight loss observed for the same antibody in IgG1 form when the antibody is administered once every week, 2 weeks, or 3 weeks, for 6 weeks at a dose of 0.5 mg/kg, 1 mg/kg or 2 mg/kg.

[0029] In another aspect, provided herein are multispecific molecules comprising the anti-FGFR antibodies, or antigen-binding portions thereof, described herein linked to a molecule having a further binding specificity for a target molecule which is not a FGF receptor.

[0030] In another aspect, provided herein are immunoconjugates comprising the anti-FGFR antibodies, or antigen-binding portions thereof, described herein linked to a binding moiety, a labeling moiety, a biologically active moiety, or a therapeutic agent.

[0031] In another aspect, provided herein are nucleic acids encoding the heavy and/or light chain variable regions of the anti-FGFR antibodies, or antigen-binding portions thereof, and multispecific molecules described herein, expression vectors comprising the nucleic acids, and cells transformed with the expression vectors.

[0032] In another aspect, provided herein are compositions comprising the anti-FGFR antibodies (e.g., monoclonal antibodies), or antigen-binding portions thereof, multispecific molecules, or immunoconjugates described herein. In one embodiment, the composition is an antibody composition comprising one or more antibodies, or antigen-binding portions thereof, which collectively bind to FGFR1c, FGFR2c, FGFR3c, and FGFR4, but not FGFR1b, FGFR2b, and/or FGFR3b.

[0033] In another aspect, provided herein are kits comprising the anti-FGFR antibodies (e.g., monoclonal antibodies), or antigen-binding portions thereof, multispecific molecules, or immunoconjugates described herein, and instructions for use.

[0034] In some embodiments, the antibodies described herein do not bind to FGFR1b, FGFR2b, and/or FGFR3b.

[0035] In some embodiments, the antibodies described herein binds to FGFR1c (e.g., human FGFR1c), FGFR2c (e.g., human FGFR2c), FGFR3c (e.g., human FGFR3c), and/or FGFR4 (e.g., human FGFR4) with a K_{D} of 10⁻⁷ M or less, e.g., as assessed by bio-layer interferometry. In some embodiments, the antibodies described herein block the binding of FGF1 and/or FGF2 to FGFR1c, FGFR2c, FGFR3c, and/or FGFR4. In further embodiments, the antibodies inhibit FGF2-mediated phosphorylation of ERK, e.g., with an IC50 of 100 nM or less, e.g., as assessed by ELISA. In some embodiments, the antibodies inhibit FGF2-mediated cell viability, e.g., with an IC50 of 100 nM or less, e.g., as assessed with a cell viability assay (e.g., CellTiterGlo). In some embodiments, the antibodies described herein have a serum half-life of 25 hours or more, 50 hours or more, or 100 hours or more in mice when administered intravenously at a single dose of 40 mg/kg.

[0036] In some embodiments, the antibodies described herein are in scFv format. In some embodiments, the antibodies described herein are human antibodies. In some embodiments, the antibodies are monoclonal antibodies. In some embodiments, the antibodies are monoclonal human antibodies. In some embodiments, the antibodies herein are IgG1, IgG2, IgG3, or IgG4 antibodies, or variants thereof. In some embodiments, the antibodies described herein comprise Fc regions with reduced or no effector function. For example, in some embodiments, the antibodies described herein are IgG2 antibodies. In one embodiment, the antibodies described herein comprise a hybrid Ig2/IgG4 constant region, e.g., a constant region comprising the amino acid sequence of SEQ ID NO: 1173 (optionally with the first 3 amino acids “AST” removed).

[0037] In another aspect, provided herein is a method of preparing an anti-FGFR antibody, or antigen-binding portion thereof, comprising expressing the antibody, or antigen binding portion thereof, described herein in cells, and isolating the antibody, or antigen binding portion thereof, from the cell.

[0038] In another aspect, provided herein are methods of blocking FGF1 or FGF2 binding to FGFR1c, FGFR2c, FGFR3c, and/or FGFR4 in a cell comprising contacting the cell with an effective amount of an anti-FGFR antibody (e.g., a monoclonal antibody), or antigen-binding portion thereof, multispecific molecule, or immunoconjugate, described herein. In another aspect, provided herein is the use of an antibody, or antigen-binding portion thereof, multispecific molecule, or immunoconjugate, described herein for the manufacture of a medicament for blocking FGF (e.g., FGF1, FGF2, or FGF18) binding to FGFR1c, FGFR2c, FGFR3c, and/or FGFR4 in a cell. In another aspect, provided herein is an antibody, or antigen-binding portion thereof, multispecific molecule, or immunoconjugate, described herein for use in blocking FGF (e.g., FGF1, FGF2, or FGF18) binding to FGFR1c, FGFR2c, FGFR3c, and/or FGFR4 in a cell.

[0039] In another aspect, provided herein is a method of inhibiting FGF-mediated signaling in a cell comprising contacting the cell with an effective amount of an anti-FGFR antibody (e.g., a monoclonal antibody), or antigen-binding portion thereof, multispecific molecule, or immunoconjugate, described herein. In another aspect, provided herein is the use of an antibody, or antigen-binding portion thereof, multispecific molecule, or immunoconjugate, described herein for the manufacture of a medicament for the inhibition of FGF-mediated signaling in a cell. In another aspect, provided herein is an antibody, or antigen-binding portion thereof, multispecific molecule, or immunoconjugate, described herein for use in the inhibition of FGF-mediated signaling in a cell.

[0040] In another aspect, provided herein is a method of inhibiting the growth of tumor cells comprising administering to a subject with a tumor a therapeutically effective amount of an anti-FGFR antibody (e.g., a monoclonal antibody), or antigen-binding portion, multispecific molecule, or immunoconjugate, described herein. In another aspect, provided herein is the use of an antibody, or antigen-binding portion thereof, multispecific molecule, or immunoconjugate, described herein for the manufacture of a medicament for the inhibition of tumor cell growth. In another aspect, provided herein is an antibody, or antigen-binding portion thereof, multispecific molecule, or immunoconjugate, described herein for use in the inhibition of tumor cell growth.

[0041] In another aspect, provided herein is a method of treating cancer comprising administering to a subject in need thereof a therapeutically effective amount of an anti-FGFR antibody (e.g., a monoclonal antibody), or antigen-binding portion, multispecific molecule, or immunoconjugate, described herein. In another aspect, provided herein is the use of an antibody, or antigen-binding portion thereof, multispecific molecule, or immunoconjugate, described herein for the manufacture of a medicament for the treatment of cancer. In another aspect, provided herein is an antibody, or antigen-binding portion thereof, multispecific molecule, or immunoconjugate, described herein for use in the treatment of cancer. In some embodiments, the cancer is a mesenchymal-like solid tumor. In some embodiments, the cancer is lung cancer, renal cancer, breast cancer, or ovarian cancer. In some embodiments, one or more additional therapeutics is administered. In some embodiments, administration of the antibody, or antigen-binding portion thereof, multispecific molecule, or immunoconjugate in the methods described above does not induce weight loss in the subject.

[0042] In another aspect, provided herein is a method of treating cancer comprising administering to a subject in need thereof a therapeutically effective amount of an IgG2 antibody that binds to FGFR1c. In another aspect, provided herein is the use of an IgG2 antibody that binds to FGFR1c for the manufacture of a medicament for the treatment of cancer. In another aspect, provided herein is an IgG2 antibody that binds to FGFR1c for use in the treatment of cancer.

[0043] In another aspect, provided herein is a method of detecting the presence of FGFR (e.g., FGFR1c, FGFR2c, FGFR3c, and/or FGFR4) in a sample comprising contacting the sample with an anti-FGFR antibody or immunoconjugate described herein under conditions that allow for formation of a complex between the antibody and FGFR protein, and detecting the formation of a complex.

[0044] Other features and advantages of the instant disclosure will be apparent from the following detailed description and examples, which should not be construed as limiting.

### BRIEF DESCRIPTION OF THE FIGURES

[0045] FIGS. 1A-1D are graphs showing the inhibition of cancer cell viability (NCI-H2286, IGROV1, Caki1, Cal51 lines) by antibodies targeting individual FGFRs or multiple FGFRs, as assessed with CellTiterGlo. FIG. 1E is a graph showing relative levels of FGFR1-4 in NCI-H2286, IGROV1, Caki1, and Cal51 cells.

[0046] FIG. 2 shows an alignment of the heavy chain variable region (VH and VL, respectively) sequences of a subset of the anti-FGFR antibodies described herein. In the alignment, #5 refers to Ab5, #73 to Ab10, #78 to Ab3, #26 to Ab15, #60 to Ab8, #50 to Ab11, #40 to Ab6, #41 to Ab1, #10 to Ab4, #59 to Ab2, #63 to Ab9, #51 to Ab7, #14 to Ab12, #24 to Ab14, and #51 to Ab7.

[0047] FIGS. 3A-3D are graphs showing the binding of a subset of anti-FGFR antibodies to recombinant human FGFR1c, FGFR2c, FGFR3c, and FGFR4, respectively, by ELISA. FIG. 3E is a graph showing that none of the antibodies tested bind to FGFR2b.

[0048] FIGS. 4A and 4B are graphs showing the inhibition of pERK activation by FGF1 and FGF2, respectively, in Ca151 cells, as assessed using the AlphaScreen SureFire ERK1/2 assay.

[0049] FIG. 5 is a graph showing that A1 (an antagonist FGFR1 antibody) in IgG1 format (A1 IgG1) and A1 in IgG2 format (IgG2m4 with C127S mutation) bind to FGFR1c with similar affinities.

[0050] FIG. 6 is a graph showing that A1 (IgG1) and A1M5 (IgG2) inhibited FGF2-induced pERK activation with similar efficacy, albeit with A1M5 showing slightly more activity at the higher concentrations.

[0051] FIGS. 7A and 7B are graphs showing that the A1 antibody induces a significant decrease in body weight of mice when administered at 1 mg/kg (FIG. 7A) or 10 mg/kg (FIG. 7B).

[0052] FIG. 7C is a graph showing that Ab15 does not significantly reduce the body weight of mice when administered at 2 mg/kg or 20 mg/kg.

[0053] FIG. 7D is a graph showing that Ab15 with full (IgG1) or partial (IgG1/4) effector function significantly reduces the body weight of mice when administered at 10 and 20 mg, whereas Ab15 with no effector function (IgG2) did not induce significant weight loss at any of the doses tested.

[0054] FIGS. 8A-8F are graphs showing the blocking of ligand (FGF1) binding to FGFR1 (FIGS. 8A-8C) and FGFR4 (FIGS. 8D-8F), as assessed by ELISA.

[0055] FIGS. 9A-9D are graphs showing the inhibition of ERK signaling, as assessed by phosphorylation ERK using the AlphaScreen SureFire assay. The grey line corresponds to basal pERK levels.

[0056] FIG. 10 is a graph showing the ability of anti-FGFR antibodies (FGFRc targeting antibodies) to inhibit viability of IROV-1 cells, as assessed by CellTiterGlo.

[0057] FIG. 11 is a graph showing PK profiles of Ab15, Ab19, and Ab90 in mice.

[0058] FIGS. 12A-12C are graphs showing the suppression of tumor growth in vivo by Ab15, Ab19, and Ab90 in the MSTO211H model (FIG. 12A), MFE280 model (FIG. 12B), and SN12C model (FIG. 12C). FIG. 12D is a graph showing that Ab15 had a minimal effect on tumor cell viability in vitro in the MSTO211H model.

### DETAILED DESCRIPTION

### I. Overview

[0059] Provided herein are isolated antibodies, particularly monoclonal antibodies, e.g., human monocloncal antibodies, which specifically bind to FGFR1c, FGFR2c, FGFR3c, and/or FGFR4 (e.g., human FGFR1c, FGFR2c, FGFR3c, and/or FGFR4), and inhibit FGFR activity. In some embodiments, the antibodies do not bind to FGFR1b, FGFR2b, and/or FGFR3b (e.g., human FGFR1b, FGFR2b, and/or FGFR3b). In some embodiments, the antibodies described herein are derived from particular heavy and light chain germline sequences and/or comprise particular structural features such as CDR regions comprising particular amino acid sequences. Provided herein are isolated antibodies, methods of making the antibodies, immunoconjugates and multispecific molecules comprising such antibodies, and pharmaceutical compositions comprising the antibodies. Also provided herein are methods of inhibiting tumor growth and methods of treating cancer using the antibodies.

### II. Definitions

[0060] In order that the present description may be more readily understood, certain terms are first defined. Additional definitions are set forth throughout the detailed description.

[0061] The term “FGF receptor” and “FGFR” and are used interchangeably herein and refer to a family of four fibroblast growth factor genes that, like all tyrosine kinase receptors, are composed of an extracellular ligand binding domain, a single transmembrane α-helix, and a cytoplasmic tyrosine kinase domain. The FGFR extracellular domain is composed of up to three immunoglobulin-like domains (D 1-3), with D2 and D3 comprising the ligand binding portion. In addition, D2 domain also includes a positively charged region that serves as a binding domain for heparan sulfate proteoglycan (HSPG), and one characteristic of the FGF receptor-ligand signaling system is the formation of a ternary complex between ligand, receptor and HSPG. Another critical distinctive feature among members of the FGF receptor (FGFR) family is the extensive use of alternative splicing to generate multiple isoforms. Splicing variants have been identified for all four mammalian FGFRs, but the most characterized variants are the splicing variations generated within the D3 domain. In fact, the alternative usage of two exons within FGF receptor genes 1, 2 and 3 (but not FGFR4) generate two receptor variants named “c” and “b” respectively.

[0062] Amino acid sequences of the “b” and “c” isoforms (also referred to as “IIIb” and “IIIc” isoforms, respectively) of the four human FGFR proteins (i.e., FGFR1-4) are provided in Table 9 as follows: Human FGFR1b (SEQ ID NO: 3), Human FGFR1c (SEQ ID NO: 1), Human FGFR2b (SEQ ID NO: 8), Human FGFR2c (SEQ ID NO: 5), Human FGFR3b (SEQ ID NO: 15), Human FGFR3c (SEQ ID NO: 11), Human FGFR4 (SEQ ID NO: 9).

[0063] The term “antibody” or “immunoglobulin,” as used interchangeably herein, includes whole antibodies and any antigen binding fragment (antigen-binding portion) or single chain cognates thereof. An “antibody” comprises at least one heavy (H) chain and one light (L) chain. In naturally occurring IgGs, for example, these heavy and light chains are inter-connected by disulfide bonds and there are two paired heavy and light chains, these two also inter-connected by disulfide bonds. Each heavy chain is comprised of a heavy chain variable region (abbreviated herein as V_{H}) and a heavy chain constant region. The heavy chain constant region is comprised of three domains, CH1, CH2 and CH3. Each light chain is comprised of a light chain variable region (abbreviated herein as V_{L}) and a light chain constant region. The light chain constant region is comprised of one domain, CL. The V_{H} and V_{L} regions can be further subdivided into regions of hypervariability, termed complementarity determining regions (CDR), interspersed with regions that are more conserved, termed framework regions (FR) or Joining (J) regions (JH or JL in heavy and light chains respectively). Each V_{H} and V_{L} is composed of three CDRs, three FRs and a J domain, arranged from amino-terminus to carboxy-terminus in the following order: FR1, CDR1, FR2, CDR2, FR3, CDR3, J. The variable regions of the heavy and light chains bind with an antigen. The constant regions of the antibodies may mediate the binding of the immunoglobulin to host tissues or factors, including various cells of the immune system (e.g., effector cells) or humoral factors such as the first component (Clq) of the classical complement system. It has been shown that fragments of a full-length antibody can perform the antigen-binding function of an antibody. Examples of binding fragments denoted as an antigen-binding portion or fragment of an antibody include (i) a Fab fragment, a monovalent fragment consisting of the V_{L}, V_{H}, CL and CH1 domains; (ii) a F(ab')₂ fragment, a bivalent fragment comprising two Fab fragments linked by a disulfide bridge at the hinge region; (iii) a Fd fragment consisting of the V_{H} and CH1 domains; (iv) a Fv fragment consisting of the V_{L} and V_{H} domains of a single arm of an antibody, (v) a dAb including VH and VL domains; (vi) a dAb fragment (Ward et al. (1989) Nature 341, 544-546), which consists of a V_{H} domain; (vii) a dAb which consists of a VH or a VL domain; and (viii) an isolated complementarity determining region (CDR) or (ix) a combination of two or more isolated CDRs which may optionally be joined by a synthetic linker. Furthermore, although the two domains of the Fv fragment, V_{L} and V_{H}, are coded for by separate genes, they can be joined, using recombinant methods, by a synthetic linker that enables them to be made as a single protein chain in which the V_{L} and V_{H} regions are paired to form monovalent molecules (such a single chain cognate of an immunoglobulin fragment is known as a single chain Fv (scFv). Such single chain antibodies are also intended to be encompassed within the term “antibody”. Antibody fragments are obtained using conventional techniques known to those with skill in the art, and the fragments are screened for utility in the same general manner as are intact antibodies. Antigen-binding portions can be produced by recombinant DNA techniques, or by enzymatic or chemical cleavage of intact immunoglobulins. Unless otherwise specified, the numbering of amino acid positions in the antibodies described herein (e.g., amino acid residues in the Fc region) and identification of regions of interest, e.g., CDRs, use the Kabat system (Kabat, E. A., et al. (1991) Sequences of Proteins of Immunological Interest, Fifth Edition, U.S. Department of Health and Human Services, NIH Publication No. 91-3242). Certain embodiments described herein define CDRs using the IMGT numbering system (Lefranc et al, Dev. Comp. Immunol, 2005; 29(3):185-203). When the IMGT numbering system is used herein, reference to CDRs will be prefaced with or incorporate the term “IMGT”, for example, “IMGT heavy chain CDR1, CDR2, and CDR3 sequences,” “IMGT VHCDR1,” “IMGT VLCDR1-3,” “VHCDR2 (IMGT).”

[0064] The term “monoclonal antibody” as used herein refers to an antibody obtained from a population of substantially homogeneous antibodies, i.e., the individual antibodies comprising the population are identical except for possible naturally occurring mutations that may be present in minor amounts. Antigen binding fragments (including scFvs) of such immunoglobulins are also encompassed by the term “monoclonal antibody” as used herein. Monoclonal antibodies are highly specific, being directed against a single antigenic site. Furthermore, in contrast to conventional (polyclonal) antibody preparations, which typically include different antibodies directed against different determinants (epitopes), each monoclonal antibody is directed against a single determinant on the antigen. Monoclonal antibodies can be prepared using any art recognized technique and those described herein such as, for example, a hybridoma method, a transgenic animal, recombinant DNA methods (see, e.g., U.S. Pat. No. 4,816,567), or using phage antibody libraries using the techniques described in, for example, US Pat. No. 7,388,088 and U.S. patent application Ser. No. 09/856,907 (PCT Int. Pub. No. WO 00/31246). Monoclonal antibodies include chimeric antibodies, human antibodies, and humanized antibodies and may occur naturally or be produced recombinantly.

[0065] As used herein, “isotype” refers to the antibody class (e.g., IgG1, IgG2, IgG3, IgG4, IgM, IgA1, IgA2, IgD, and IgE antibody) that is encoded by the heavy chain constant region genes.

[0066] The term “recombinant antibody,” refers to antibodies that are prepared, expressed, created or isolated by recombinant means, such as (a) antibodies isolated from an animal (e.g., a mouse) that is transgenic or transchromosomal for immunoglobulin genes (e.g., human immunoglobulin genes) or a hybridoma prepared therefrom, (b) antibodies isolated from a host cell transformed to express the antibody, e.g., from a transfectoma, (c) antibodies isolated from a recombinant, combinatorial antibody library (e.g., containing human antibody sequences) using phage display, and (d) antibodies prepared, expressed, created or isolated by any other means that involve splicing of immunoglobulin gene sequences (e.g., human immunoglobulin genes) to other DNA sequences. Such recombinant antibodies may have variable and constant regions derived from human germline immunoglobulin sequences. In certain embodiments, however, such recombinant human antibodies can be subjected to in vitro mutagenesis and thus the amino acid sequences of the V_{H} and V_{L} regions of the recombinant antibodies are sequences that, while derived from and related to human germline V_{H} and V_{L} sequences, may not naturally exist within the human antibody germline repertoire in vivo.

[0067] The term “chimeric immunoglobulin” or antibody refers to an immunoglobulin or antibody whose variable regions derive from a first species and whose constant regions derive from a second species. Chimeric immunoglobulins or antibodies can be constructed, for example by genetic engineering, from immunoglobulin gene segments belonging to different species.

[0068] The term “human antibody,” as used herein, is intended to include antibodies having variable regions in which both the framework and CDR regions are derived from human germline immunoglobulin sequences as described, for example, by Kabat et al. (See Kabat, et al. (1991) Sequences of proteins of Immunological Interest, Fifth Edition, U.S. Department of Health and Human Services, NIH Publication No. 91-3242). Furthermore, if the antibody contains a constant region, the constant region also is derived from human germline immunoglobulin sequences. The human antibodies may include amino acid residues not encoded by human germline immunoglobulin sequences (e.g., mutations introduced by random or site-specific mutagenesis in vitro or by somatic mutation in vivo). However, the term “human antibody”, as used herein, is not intended to include antibodies in which CDR sequences derived from the germline of another mammalian species, such as a mouse, have been grafted onto human framework sequences.

[0069] The human antibody can have at least one or more amino acids replaced with an amino acid residue, e.g., an activity enhancing amino acid residue that is not encoded by the human germline immunoglobulin sequence. Typically, the human antibody can have up to twenty positions replaced with amino acid residues that are not part of the human germline immunoglobulin sequence. In a particular embodiment, these replacements are within the CDR regions as described in detail below.

[0070] The term “humanized antibody” refers to an antibody that includes at least one humanized antibody chain (i.e., at least one humanized light or heavy chain). The term “humanized antibody chain” (i.e., a “humanized immunoglobulin light chain”) refers to an antibody chain (i.e., a light or heavy chain, respectively) having a variable region that includes a variable framework region substantially from a human antibody and complementarity determining regions (CDRs) (e.g., at least one CDR, two CDRs, or three CDRs) substantially from a non-human antibody, and further includes constant regions (e.g., one constant region or portion thereof, in the case of a light chain, and preferably three constant regions in the case of a heavy chain).

[0071] A “bispecific” or “bifunctional antibody” is an artificial hybrid antibody having two different heavy/light chain pairs and two different binding sites. Bispecific antibodies can be produced by a variety of methods including fusion of hybridomas or linking of Fab′ fragments. See, e.g., Songsivilai & Lachmann, Clin. Exp. Immunol. 79:315-321 (1990); Kostelny et al., J. Immunol. 148, 1547-1553 (1992).

[0072] “Isolated,” as used herein, is intended to refer to an antibody that is substantially free of other antibodies having different antigenic specificities. In addition, an isolated antibody is typically substantially free of other cellular material and/or chemicals.

[0073] An “effector function” refers to the interaction of an antibody Fc region with an Fc receptor or ligand, or a biochemical event that results therefrom. Exemplary “effector functions” include Clq binding, complement dependent cytotoxicity (CDC), Fc receptor binding, FcγR-mediated effector functions such as ADCC and antibody dependent cell-mediated phagocytosis (ADCP), and downregulation of a cell surface receptor (e.g., the B cell receptor; BCR). Such effector functions generally require the Fc region to be combined with a binding domain (e.g., an antibody variable domain).

[0074] An “Fc region,” “Fc domain,” or “Fc” refers to the C-terminal region of the heavy chain of an antibody. Thus, an Fc region comprises the constant region of an antibody excluding the first constant region immunoglobulin domain (e.g., CH1 or CL).

[0075] An “antigen” is an entity (e.g., a proteinaceous entity or peptide) to which an antibody binds. In various embodiments, an antigen is an FGF receptor. In a particular embodiment, an antigen is human FGFR1c, FGFR2c, FGFR3c, and/or FGFR4.

[0076] The terms “specific binding,” “specifically binds,” “selective binding,” and “selectively binds,” mean that an antibody exhibits appreciable affinity for a particular antigen or epitope and, generally, does not exhibit significant cross-reactivity with other antigens and epitopes. “Appreciable” or preferred binding includes binding with a K_{D} of 10⁻⁷, 10⁻⁸, 10⁻⁹, or 10⁻¹⁰ M or better. The K_{D} of an antibody antigen interaction (the affinity constant) indicates the concentration of antibody at which 50% of antibody and antigen molecules are bound together. Thus, at a suitable fixed antigen concentration, 50% of a higher (i.e., stronger) affinity antibody will bind antigen molecules at a lower antibody concentration than would be required to achieve the same percent binding with a lower affinity antibody. Thus a lower K_{D} value indicates a higher (stronger) affinity. As used herein, “better” affinities are stronger affinities, and are of lower numeric value than their comparators, with a K_{D} of 10⁻⁷M being of lower numeric value and therefore representing a better affinity than a K_{D} of 10⁻⁶M. Affinities better (i.e., with a lower K_{D} value and therefore stronger) than 10⁻⁷M, preferably better than 10⁻⁸M, are generally preferred. Values intermediate to those set forth herein are also contemplated, and a preferred binding affinity can be indicated as a range of affinities, for example preferred binding affinities for anti-FGFR antibodies disclosed herein are, 10⁻⁷ to 10⁻¹²M, more preferably 10⁻⁸ to 10⁻¹² M. An antibody that “does not exhibit significant cross-reactivity” or “does not bind with a physiologically-relevant affinity” is one that will not appreciably bind to an off target antigen (e.g., a non-FGFR protein or an FGFR protein of the IIIb isoform). For example, in one embodiment, an antibody that specifically binds to FGFR1c will exhibit at least a two, and preferably three, or four or more orders of magnitude better binding affinity (i.e., binding exhibiting a two, three, or four or more orders of magnitude lower K_{D} value) for FGFR1c than, e.g., FGFR1b or a protein other than FGFR. Specific or selective binding can be determined according to any art-recognized means for determining such binding, including, for example, according to Scatchard analysis, Biacore analysis, bio-layer interferometry, and/or competitive (competition) binding assays as described herein. In one embodiment, “does not specifically bind to FGFR1b, FGFR2b, and/or FGFR3b” refers to an antibody which does not bind to FGFR1b, FGFR2b, and/or FGFR3b with an affinity significantly (statistically) different from a control antibody (e.g., an antibody that binds to an antigen other than FGFR proteins), as assessed by, e.g., bio-layer interferometry or ELISA.

[0077] The term “K_{D},” as used herein, is intended to refer to the dissociation equilibrium constant of a particular antibody-antigen interaction or the affinity of an antibody for an antigen. In other embodiments, an antibody binds an antigen with an affinity (K_{D}) of approximately less than 10⁻⁷ M, such as approximately less than 10⁻⁸ M, 10⁻⁹ M or 10⁻¹⁰ M or even lower when determined by bio-layer interferometery with a Pall ForteBio Octet RED96 Bio-Layer Interferometry system or surface plasmon resonance (SPR) technology in a BIACORE 3000 instrument using recombinant FGFR1c, FGFR2c, FGFR3c, and/or FGFR4 as the analyte and the antibody as the ligand, and binds to the predetermined antigen with an affinity that is at least two-fold greater than its affinity for binding to a non-specific antigen (e.g., BSA, casein) other than the predetermined antigen or a closely-related antigen. Other methods for determining K_{D} include equilibrium binding to live cells expressing FGFR1c, FGFR2c, FGFR3c, and/or FGFR4 via flow cytometry (FACS) or in solution using KinExA® technology.

[0078] The term “k_{assoc}” or “kₐ”, as used herein, is intended to refer to the association rate of a particular antibody-antigen interaction, whereas the term “k_{dis}”or “k_{d},” as used herein, is intended to refer to the dissociation rate of a particular antibody-antigen interaction. The term “K_{D}”, as used herein, is intended to refer to the dissociation constant, which is obtained from the ratio of k_{d} to kₐ (i.e,. k_{d}/kₐ) and is expressed as a molar concentration (M). K_{D} values for antibodies can be determined using methods well established in the art.

[0079] The terms “IC50” and “IC90,” as used herein, refer to the measure of the effectiveness of a compound (e.g., an anti-FGFR antibody described herein) in inhibiting a biological or biochemical function (e.g., the function or activity of FGFR1c, FGFR2c, FGFR3c, and/or FGFR4) by 50% and 90%, respectively. For example, IC50 indicates how much of an anti-FGFR antibody is needed to inhibit the activity of FGFR1c, FGFR2c, FGFR3c, and/or FGFR4 (e.g., the growth of a cell expressing FGFR1c, FGFR2c, FGFR3c, and/or FGFR4) by half. That is, it is the half maximal (50%) inhibitory concentration (IC) of an anti-FGFR antibody (50% IC, or IC₅₀). According to the FDA, IC50 represents the concentration of a drug that is required for 50% inhibition in vitro. The IC50 and IC90 can be determined by techniques known in the art, for example, by constructing a dose-response curve and examining the effect of different concentrations of the antagonist (i.e., the anti-FGFR antibody) on reversing FGFR activity.

[0080] The term “EC50” in the context of an in vitro or in vivo assay using an antibody or antigen binding fragment thereof, refers to the concentration of an antibody or an antigen-binding portion thereof that induces a response that is 50% of the maximal response, i.e., halfway between the maximal response and the baseline.

[0081] The term “epitope” or “antigenic determinant” refers to a site on an antigen to which an immunoglobulin or antibody specifically binds. Epitopes can be formed both from contiguous amino acids (usually a linear epitope) or noncontiguous amino acids juxtaposed by tertiary folding of a protein (usually a conformational epitope). Epitopes formed from contiguous amino acids are typically, but not always, retained on exposure to denaturing solvents, whereas epitopes formed by tertiary folding are typically lost on treatment with denaturing solvents. Methods for determining what epitopes are bound by a given antibody (i.e., epitope mapping) are well known in the art and include, for example, immunoblotting and immunoprecipitation assays, wherein overlapping or contiguous peptides are tested for reactivity with a given antibody. Methods of determining spatial conformation of epitopes include techniques in the art, for example, x-ray crystallography, 2-dimensional nuclear magnetic resonance and HDX-MS (see, e.g., Epitope Mapping Protocols in Methods in Molecular Biology, Vol. 66, G. E. Morris, Ed. (1996)). The term “epitope mapping” refers to the process of identification of the molecular determinants for antibody-antigen recognition.

[0082] The term “binds to the same epitope” with reference to two or more antibodies means that the antibodies bind to the same segment of amino acid residues, as determined by a given method. Techniques for determining whether antibodies bind to the “same epitope on FGFR1c, FGFR2c, FGFR3c, and/or FGFR4” with the antibodies described herein include, for example, epitope mapping methods, such as, x-ray analyses of crystals of antigen:antibody complexes which provides atomic resolution of the epitope and hydrogen/deuterium exchange mass spectrometry (HDX-MS). Other methods monitor the binding of the antibody to antigen fragments or mutated variations of the antigen where loss of binding due to a modification of an amino acid residue within the antigen sequence is often considered an indication of an epitope component. In addition, computational combinatorial methods for epitope mapping can also be used. These methods rely on the ability of the antibody of interest to affinity isolate specific short peptides from combinatorial phage display peptide libraries. Antibodies having the same VH and VL or the same CDR1, 2 and 3 sequences are expected to bind to the same epitope.

[0083] Antibodies that “compete with another antibody for binding to a target” refer to antibodies that inhibit (partially or completely) the binding of the other antibody to the target. Whether two antibodies compete with each other for binding to a target, i.e., whether and to what extent one antibody inhibits the binding of the other antibody to a target, may be determined using known competition experiments. In certain embodiments, an antibody competes with, and inhibits binding of another antibody to a target by at least 10%, 20%, 30%, 40%, 50%, 60%, 70%, 80%, 90% or 100%. The level of inhibition or competition may be different depending on which antibody is the “blocking antibody” (i.e., the cold antibody that is incubated first with the target). Competition assays can be conducted as described, for example, in Ed Harlow and David Lane, Cold Spring Harb Protoc ; 2006; doi:10.1101/pdb.prot4277 or in Chapter 11 of “Using Antibodies” by Ed Harlow and David Lane, Cold Spring Harbor Laboratory Press, Cold Spring Harbor, N.Y., USA 1999. Competing antibodies bind to the same epitope, an overlapping epitope or to adjacent epitopes (e.g., as evidenced by steric hindrance). Other competitive binding assays include: solid phase direct or indirect radioimmunoassay (RIA), solid phase direct or indirect enzyme immunoassay (EIA), sandwich competition assay (see Stahli et al., Methods in Enzymology 9:242 (1983)); solid phase direct biotin-avidin EIA (see Kirkland et al., J. Immunol. 137:3614 (1986)); solid phase direct labeled assay, solid phase direct labeled sandwich assay (see Harlow and Lane, Antibodies: A Laboratory Manual, Cold Spring Harbor Press (1988)); solid phase direct label RIA using 1-125 label (see Morel et al., Mol. Immunol. 25(1):7 (1988)); solid phase direct biotin-avidin EIA (Cheung et al., Virology 176:546 (1990)); and direct labeled RIA. (Moldenhauer et al., Scand. J. Immunol. 32:77 (1990)).

[0084] The term “nucleic acid molecule,” as used herein, is intended to include DNA molecules and RNA molecules. A nucleic acid molecule may be single-stranded or double-stranded, but preferably is double-stranded DNA.

[0085] The term “isolated nucleic acid molecule,” as used herein in reference to nucleic acids encoding antibodies or antibody fragments (e.g., V_{H}, V_{L}, CDR3), is intended to refer to a nucleic acid molecule in which the nucleotide sequences are essentially free of other genomic nucleotide sequences, e.g., those encoding antibodies that bind antigens other than FGFR, which other sequences may naturally flank the nucleic acid in human genomic DNA.

[0086] The term “modifying,” or “modification,” as used herein, refers to changing one or more amino acids in an antibody or antigen-binding portion thereof. The change can be produced by adding, substituting or deleting an amino acid at one or more positions. The change can be produced using known techniques, such as PCR mutagenesis. For example, in some embodiments, an antibody or an antigen-binding portion thereof identified using the methods provided herein can be modified, to thereby modify the binding affinity of the antibody or antigen-binding portion thereof to FGFR (e.g., FGFR1c, FGFR2c, FGFR3c, and/or FGFR4).

[0087] “Conservative amino acid substitutions” in the sequences of the antibodies refer to nucleotide and amino acid sequence modifications which do not abrogate the binding of the antibody encoded by the nucleotide sequence or containing the amino acid sequence, to the antigen (e.g., FGFR1c, FGFR2c, FGFR3c, and/or FGFR4). Conservative amino acid substitutions include the substitution of an amino acid in one class by an amino acid of the same class, where a class is defined by common physicochemical amino acid side chain properties and high substitution frequencies in homologous proteins found in nature, as determined, for example, by a standard Dayhoff frequency exchange matrix or BLOSUM matrix. Six general classes of amino acid side chains have been categorized and include: Class I (Cys); Class II (Ser, Thr, Pro, Ala, Gly); Class III (Asn, Asp, Gln, Glu); Class IV (His, Arg, Lys); Class V (Ile, Leu, Val, Met); and Class VI (Phe, Tyr, Trp). For example, substitution of an Asp for another class III residue such as Asn, Gln, or Glu, is a conservative substitution. Thus, a predicted nonessential amino acid residue in an anti-FGFR antibody is preferably replaced with another amino acid residue from the same class. Methods of identifying nucleotide and amino acid conservative substitutions which do not eliminate antigen binding are well-known in the art.

[0088] The term “non-conservative amino acid substitution” refers to the substitution of an amino acid in one class with an amino acid from another class; for example, substitution of an Ala, a class II residue, with a class III residue such as Asp, Asn, Glu, or Gln.

[0089] Alternatively, in another embodiment, mutations (conservative or non-conservative) can be introduced randomly along all or part of an anti-FGFR antibody coding sequence, such as by saturation mutagenesis, and the resulting modified anti-FGFR antibodies can be screened for binding activity.

[0090] A “consensus sequence” is a sequence formed from the most frequently occurring amino acids (or nucleotides) in a family of related sequences. In a family of proteins, each position in the consensus sequence is occupied by the amino acid occurring most frequently at that position in the family. If two amino acids occur equally frequently, either can be included in the consensus sequence. A “consensus framework” of an immunoglobulin refers to a framework region in the consensus immunoglobulin sequence. Similarly, the consensus sequence for the CDRs of can be derived by optimal alignment of the CDR amino acid sequences of anti-FGFR antibodies provided herein. For example, a consensus CDR sequence may be presented in the form of AB[CD]EF[GH], wherein the residue at the bracketed position (i.e., positions 3 and 6) is selected from a residue listed within the bracket. Accordingly, AB[CD]EF[GH] would encompass the CDR sequences ABCEFG, ABCEFH, ABDEFG, and ABDEFH.

[0091] For nucleic acids, the term “substantial homology” indicates that two nucleic acids, or designated sequences thereof, when optimally aligned and compared, are identical, with appropriate nucleotide insertions or deletions, in at least about 80% of the nucleotides, usually at least about 90% to 95%, and more preferably at least about 98% to 99.5% of the nucleotides. Alternatively, substantial homology exists when the segments will hybridize under selective hybridization conditions, to the complement of the strand. For polypeptides, the term “substantial homology” indicates that two polypeptides, or designated sequences thereof, when optimally aligned and compared, are identical, with appropriate amino acid insertions or deletions, in at least about 80% of the amino acids, usually at least about 90% to 95%, and more preferably at least about 98% to 99.5% of the amino acids.

[0092] The nucleic acids may be present in whole cells, in a cell lysate, or in a partially purified or substantially pure form. A nucleic acid is “isolated” or “rendered substantially pure” when purified away from other cellular components or other contaminants, e.g., other cellular nucleic acids or proteins, by standard techniques, including alkaline/SDS treatment, CsCl banding, column chromatography, agarose gel electrophoresis and others well known in the art.

[0093] The nucleic acid compositions, while often comprising a native sequence (except for modified restriction sites and the like), from either cDNA, genomic or mixtures thereof may alternately be mutated, in accordance with standard techniques to provide altered gene sequences. For coding sequences, these mutations, may modify the encoded amino acid sequence as desired. In particular, DNA sequences substantially homologous to native V, D, J, constant, switches and other such sequences described herein are contemplated.

[0094] As used herein, “percent (%) identity” with respect to a reference polypeptide or nucleotide sequence is defined as the percentage of amino acid or nucleotide residues in a candidate sequence that are identical with the amino acid or nucleotide residues in the reference polypeptide or nucleotide sequence, after aligning the sequences and introducing gaps, if necessary, to achieve the maximum percent sequence identity, and not considering any conservative substitutions as part of the sequence identity. Alignment for purposes of determining percent identity of amino acid or nucleotide sequences can be achieved in various ways that are within the skill in the art, for instance, using publicly available computer software such as BLAST, BLAST-2, ALIGN or Megalign (DNASTAR) software. Those skilled in the art can determine appropriate parameters for aligning sequences, including any algorithms needed to achieve maximal alignment over the full length of the sequences being compared.

[0095] For purposes herein, percent identity values are generated using the BLASTN (nucleotides) or BLASTP (polypeptides) algorithm with default settings. The BLASTN program (for nucleotide sequences) uses as defaults a wordlength (W) of 11, an expectation (E) of 10, M=5, N=−4, and a comparison of both strands. For amino acid sequences, the BLASTP program uses as defaults a wordlength (W) of 3, an expectation (E) of 10, and the BLOSUM62 scoring matrix (see Henikoff & Henikoff, Proc. Natl. Acad. Sci. USA 89:10915 (1989)).

[0096] Different regions within a single polynucleotide or polypeptide target sequence that aligns with a polynucleotide or polypeptide reference sequence can each have their own percent sequence identity. It will be appreciated that where the length of sequence A is not equal to the length of sequence B, the % identity of A to B will not equal the % identity of B to A. Unless specifically stated otherwise, all % identity values used herein are obtained using the BLASTP (for polypeptides) or BLASTN program.

[0097] The nucleic acid and protein sequences described herein can further be used as a “query sequence” to perform a search against public databases to, for example, identify related sequences. Such searches can be performed using the NBLAST and XBLAST programs (version 2.0) of Altschul, et al. (1990) J. Mol. Biol. 215:403-10. BLAST nucleotide searches can be performed with the NBLAST program, score=100, wordlength=12 to obtain nucleotide sequences homologous to the nucleic acid molecules described herein. BLAST protein searches can be performed with the XBLAST program, score=50, wordlength=3 to obtain amino acid sequences homologous to the protein molecules described herein. To obtain gapped alignments for comparison purposes, Gapped BLAST can be utilized as described in Altschul et al., (1997) Nucleic Acids Res. 25(17):3389-3402. When utilizing BLAST and Gapped BLAST programs, the default parameters of the respective programs (e.g., XBLAST and NBLAST) can be used. See www.ncbi.nlm.nih.gov.

[0098] The term “operably linked” refers to a nucleic acid sequence placed into a functional relationship with another nucleic acid sequence. For example, DNA for a presequence or secretory leader is operably linked to DNA for a polypeptide if it is expressed as a pre-protein that participates in the secretion of the polypeptide; a promoter or enhancer is operably linked to a coding sequence if it affects the transcription of the sequence; or a ribosome binding site is operably linked to a coding sequence if it is positioned so as to facilitate translation. Generally, “operably linked” means that the DNA sequences being linked are contiguous, and, in the case of a secretory leader, contiguous and in reading phase. However, enhancers do not have to be contiguous. Linking is accomplished by ligation at convenient restriction sites. If such sites do not exist, the synthetic oligonucleotide adaptors or linkers are used in accordance with conventional practice. A nucleic acid is “operably linked” when it is placed into a functional relationship with another nucleic acid sequence. For instance, a promoter or enhancer is operably linked to a coding sequence if it affects the transcription of the sequence. With respect to transcription regulatory sequences, operably linked means that the DNA sequences being linked are contiguous and, where necessary to join two protein coding regions, contiguous and in reading frame. For switch sequences, operably linked indicates that the sequences are capable of effecting switch recombination.

[0099] The term “vector,” as used herein, is intended to refer to a nucleic acid molecule capable of transporting another nucleic acid to which it has been linked. One type of vector is a “plasmid,” which refers to a circular double stranded DNA loop into which additional DNA segments may be ligated. Another type of vector is a viral vector, wherein additional DNA segments may be ligated into the viral genome. Certain vectors are capable of autonomous replication in a host cell into which they are introduced (e.g., bacterial vectors having a bacterial origin of replication and episomal mammalian vectors). Other vectors (e.g., non-episomal mammalian vectors) can be integrated into the genome of a host cell upon introduction into the host cell, and thereby are replicated along with the host genome. Moreover, certain vectors are capable of directing the expression of genes to which they are operatively linked. Such vectors are referred to herein as “recombinant expression vectors” (or simply, “expression vectors”). In general, expression vectors of utility in recombinant DNA techniques are often in the form of plasmids. The terms, “plasmid” and “vector” may be used interchangeably. However, other forms of expression vectors, such as viral vectors (e.g., replication defective retroviruses, adenoviruses and adeno-associated viruses), which serve equivalent functions are also contemplated.

[0100] The term “recombinant host cell” (or simply “host cell”), as used herein, is intended to refer to a cell into which a recombinant expression vector has been introduced. It should be understood that such terms are intended to refer not only to the particular subject cell but to the progeny of such a cell. Because certain modifications may occur in succeeding generations due to either mutation or environmental influences, such progeny may not, in fact, be identical to the parent cell, but are still included within the scope of the term “host cell” as used herein.

[0101] As used herein, the term “linked” refers to the association of two or more molecules. The linkage can be covalent or non-covalent. The linkage also can be genetic (i.e., recombinantly fused). Such linkages can be achieved using a wide variety of art recognized techniques, such as chemical conjugation and recombinant protein production.

[0102] The term “inhibition” as used herein, refers to any statistically significant decrease in biological activity, including partial and full blocking of the activity. For example, “inhibition” can refer to a statistically significant decrease of about 10%, 20%, 30%, 40%, 50%, 60%, 70%, 80%, 90%, 95%, 96%, 97%, 98%, 99%, or 100% in biological activity.

[0103] Inhibition of phosphorylation, as used herein, refers to the ability of an antibody to statistically significantly decrease the phosphorylation of a substrate protein relative to the signaling in the absence of the antibody (control). As is known in the art, intracellular signaling pathways include, for example, the mitogen-activated protein kinase (MAPK/ERK or “ERK”) pathway. As is also known in the art, FGFR-mediated signaling can be measured by assaying for the level phosphorylation of the substrate (e.g., phosphorylation or no phosphorylation of ERK). Accordingly, in one embodiment, the anti-FGFR antibodies and compositions described herein provide statistically significant inhibition of the level of phosphorylation of ERK by at least 10%, or at least 20%, or at least 30%, or at least 40%, or at least 50%, or at least 60%, or at least 70%, or at least 80%, or at least 90%, or about 100% relative to the level of phosphorylation ERK in the absence of such antibody (control). Such FGFR mediated signaling can be measured using art recognized techniques which measure a protein in a cellular cascade involving FGFR, e.g., ELISA, western, or multiplex methods, such as Luminex®.

[0104] The phrase “inhibition of the growth of cells expressing FGFR,” as used herein, refers to the ability of an antibody to statistically significantly decrease the growth of a cell expressing FGFR relative to the growth of the cell in the absence of the antibody (control) either in vivo or in vitro. In one embodiment, the growth of a cell expressing FGFR (e.g., a cancer cell) may be decreased by at least 10%, or at least 20%, or at least 30%, or at least 40%, or at least 50%, or at least 60%, or at least 70%, or at least 80%, or at least 90%, or about 100% when the cells are contacted with an antibody or composition disclosed herein, relative to the growth measured in the absence of the antibody or composition (control). Cellular growth can be assayed using art recognized techniques which measure the rate of cell division, the fraction of cells within a cell population undergoing cell division, and/or the rate of cell loss from a cell population due to terminal differentiation or cell death (e.g., using a cell titer glow assay or thymidine incorporation).

[0105] The phrase “inhibition of FGFR ligand binding to FGFR,” as used herein, refers to the ability of an antibody to statistically significantly decrease the binding of an FGFR ligand to its receptor, FGFR (e.g., FGFR1c, FGFR2c, FGFR3c and/or FGFR4), relative to the FGFR ligand binding in the absence of the antibody (control). In other words, in the presence of the antibody, the amount of the FGFR ligand that binds to FGFR relative to a control (no antibody), is statistically significantly decreased. The amount of an FGFR ligand which binds FGFR may be decreased in the presence of an antibody composition or combination disclosed herein by at least 10%, or at least 20%, or at least 30%, or at least 40%, or at least 50%, or at least 60%, or at least 70%, or at least 80%, or at least 90%, or about 100% relative to the amount in the absence of the antibody (control). A decrease in FGFR ligand binding can be measured using art-recognized techniques that measure the level of binding of labeled FGFR ligand (e.g., radiolabelled FGF) to cells expressing FGFR in the presence or absence (control) of the antibody.

[0106] As used herein, the term “inhibits growth” of a tumor includes any measurable decrease in the growth of a tumor, e.g., the inhibition of growth of a tumor by at least about 10%, for example, at least about 20%, at least about 30%, at least about 40%, at least about 50%, at least about 60%, at least about 70%, at least about 80%, at least about 90%, at least about 99%, or 100%.

[0107] The terms “treat,” “treating,” and “treatment,” as used herein, refer to therapeutic or preventative measures described herein. The methods of “treatment” employ administration to a subject, an antibody or antibody pair or trio disclosed herein, for example, a subject having a disease or disorder associated with FGFR-dependent signaling or predisposed to having such a disease or disorder, in order to prevent, cure, delay, reduce the severity of, or ameliorate one or more symptoms of the disease or disorder or recurring disease or disorder, or in order to prolong the survival of a subject beyond that expected in the absence of such treatment.

[0108] The term “disease associated with FGFR-dependent signaling,” or “disorder associated with FGFR-dependent signaling,” as used herein, includes disease states and/or symptoms associated with a disease state, where increased levels of FGFR and/or activation of cellular cascades involving FGFR are found. The term “disease associated with FGFR-dependent signaling,” also includes disease states and/or symptoms associated with the activation of alternative FGFR signaling pathways. In general, the term “disease associated with FGFR dependent signaling,” refers to any disorder, the onset, progression or the persistence of the symptoms of which requires the participation of FGFR. Exemplary FGFR-mediated disorders include, but are not limited to, for example, cancer.

[0109] The terms “cancer” and “cancerous” refer to or describe the physiological condition in mammals that is typically characterized by unregulated cell growth. Examples of cancer include but are not limited to, carcinoma, lymphoma, blastoma, sarcoma, and leukemia. More particular examples of such cancers include squamous cell cancer, small-cell lung cancer, non-small cell lung cancer, gastric cancer, pancreatic cancer, glial cell tumors such as glioblastoma and neurofibromatosis, cervical cancer, ovarian cancer, liver cancer, bladder cancer, hepatoma, breast cancer, colon cancer, melanoma, colorectal cancer, endometrial carcinoma, salivary gland carcinoma, kidney cancer, renal cancer, prostate cancer, vulval cancer, thyroid cancer, hepatic carcinoma and various types of head and neck cancer.

[0110] The term “effective dose” or “effective dosage” is defined as an amount sufficient to achieve or at least partially achieve the desired effect. The term “therapeutically effective dose” is defined as an amount sufficient to cure or at least partially arrest the disease and its complications in a patient already suffering from the disease. Amounts effective for this use will depend upon the severity of the disorder being treated and the general state of the patient's own immune system.

[0111] The term “therapeutic agent” in intended to encompass any and all compounds that have an ability to decrease or inhibit the severity of the symptoms of a disease or disorder, or increase the frequency and/or duration of symptom-free or symptom-reduced periods in a disease or disorder, or inhibit or prevent impairment or disability due to a disease or disorder affliction, or inhibit or delay progression of a disease or disorder, or inhibit or delay onset of a disease or disorder, or inhibit or prevent infection in an infectious disease or disorder. Non-limiting examples of therapeutic agents include small organic molecules, monoclonal antibodies, bispecific antibodies, recombinantly engineered biologics, RNAi compounds, tyrosine kinase inhibitors (e.g., PI3K inhibitors), and commercial antibodies. In certain embodiments, tyrosine kinase inhibitors include, e.g., one or more of erlotinib, gefitinib, and lapatinib, which are currently marketed pharmaceuticals.

[0112] As used herein, “administering” refers to the physical introduction of a composition comprising a therapeutic agent to a subject, using any of the various methods and delivery systems known to those skilled in the art. Exemplary routes of administration for antibodies described herein include intravenous, intraperitoneal, intramuscular, subcutaneous, spinal or other parenteral routes of administration, for example by injection or infusion. The phrase “parenteral administration” as used herein means modes of administration other than enteral and topical administration, usually by injection, and includes, without limitation, intravenous, intraperitoneal, intramuscular, intraarterial, intrathecal, intralymphatic, intralesional, intracapsular, intraorbital, intracardiac, intradermal, transtracheal, subcutaneous, subcuticular, intraarticular, subcapsular, subarachnoid, intraspinal, epidural and intrasternal injection and infusion, as well as in vivo electroporation. Alternatively, an antibody described herein can be administered via a non-parenteral route, such as a topical, epidermal or mucosal route of administration, for example, intranasally, orally, vaginally, rectally, sublingually or topically. Administering can also be performed, for example, once, a plurality of times, and/or over one or more extended periods.

[0113] The term “patient” includes human and other mammalian subjects that receive either prophylactic or therapeutic treatment.

[0114] The term “subject” includes any mammal. For example, the methods and compositions herein disclosed can be used to treat a subject having cancer. In a particular embodiment, the subject is a human.

[0115] The term “sample” refers to tissue, body fluid, or a cell (or a fraction of any of the foregoing) taken from a patient or a subject. Normally, the tissue or cell will be removed from the patient, but in vivo diagnosis is also contemplated. In the case of a solid tumor, a tissue sample can be taken from a surgically removed tumor and prepared for testing by conventional techniques. In the case of lymphomas and leukemias, lymphocytes, leukemic cells, or lymph tissues can be obtained (e.g., leukemic cells from blood) and appropriately prepared. Other samples, including urine, tears, serum, plasma, cerebrospinal fluid, feces, sputum, cell extracts etc. can also be useful for particular cancers.

[0116] As used herein, the term “about” means plus or minus 10% of a specified value. As used herein, the term “and/or” includes any and all combinations of one or more of the associated listed items. For example, the phrase “FGFR1c, FGFR2c, FGFR3c, and/or FGFR4” is intended to encompass each of FGFR1c, FGFR2c, FGFR3c, and FGFR4 individually, all four of FGFR1c, FGFR2c, FGFR3c, and FGFR4, as well as in any combination thereof (i.e., all combinations of two of FGFR1c, FGFR2c, FGFR3c, and FGFR4, and all combinations of three of FGFR1c, FGFR2c, FGFR3c, and FGFR4). Accordingly, “FGFR1c, FGFR2c, FGFR3c, and/or FGFR4” is intended to encompass the following: FGFR1c; FGFR2c; FGFR3c; FGFR4; FGFR1c and FGFR2c; FGFR1c and FGFR3c; FGFR1c and FGFR4; FGFR2c and FGFR3c; FGFR2c and FGFR4; FGFR3c and FGFR4; FGFR1c, FGFR2c, and FGFR3c; FGFR1c, FGFR3c, and FGFR4; FGFR2c, FGFR3c, and FGFR4; and FGFR1c, FGFR2c, FGFR3c, and FGFR4. Furthermore, “FGFR1b, FGFR2b, and/or FGFR3b” is intended to encompass the following: FGFR1b; FGFR2b; FGFR3b; FGFR1b and FGFR2b; FGFR1b and FGFR3b; FGFR2b and FGFR3b; and FGFR1b, FGFR2b, and FGFR3b.

[0117] As used herein, the phrase “Ab1-Ab107” is interchangeable with “Abl through Ab107” and is shorthand for the 107 anti-FGFR antibodies described in Table 9. Specifically, “Ab1-Ab107” encompasses Ab1, Ab2, Ab3, Ab4, Ab5, Ab6, Ab7, Ab8, Ab9, Ab10, Ab11, Ab12, Ab13, Ab14, Ab15, Ab16, Ab17, Ab18, Ab19, Ab20, Ab21, Ab22, Ab23, Ab24, Ab25, Ab26, Ab27, Ab28, Ab29, Ab30, Ab31, Ab32, Ab33, Ab34, Ab35, Ab36, Ab37, Ab38, Ab39, Ab40, Ab41, Ab42, Ab43, Ab44, Ab45, Ab46, Ab47, Ab48, Ab49, Ab50, Ab51, Ab52, Ab53, Ab54, Ab55, Ab56, Ab57, Ab58, Ab59, Ab60, Ab61, Ab62, Ab63, Ab64, Ab65, Ab66, Ab67, Ab68, Ab69, Ab70, Ab71, Ab72, Ab73, Ab74, Ab75, Ab76, Ab77, Ab78, Ab79, Ab80, Ab81, Ab82, Ab83, Ab84, Ab85, Ab86, Ab87, Ab88, Ab89, Ab90, Ab91, Ab92, Ab93, Ab94, Ab95, Ab96, Ab97, Ab98, Ab99, Ab100, Ab101, Ab102, Ab103, Ab104, Ab105, Ab106, and Ab107. The phrase “any of Ab1-Ab107” is intended to encompass any one of the 107 antibodies.

[0118] As used in the description of the invention and the appended claims, the singular forms “a,” “an” and “the” are intended to include the plural forms as well, unless the context clearly indicates otherwise.

[0119] Various aspects of the disclosure are described in further detail in the following subsections.

### III. Anti-FGFR Antibodies

[0120] Provided herein are antibodies which specifically bind to the extracellular domain of particular isoforms of FGFR proteins (e.g., human FGFR proteins). For example, the antibodies described herein bind specifically to the extracellular domains of FGFR1c, FGFR2c, FGFR3c, and/or FGFR4 (e.g., human FGFR1c, FGFR2c, FGFR3c, and/or FGFR4). In some embodiments, the antibodies, or antigen-binding portions thereof, do not bind to FGFR1b, FGFR2b, and/or FGFR3b (e.g., human FGFR1b, FGFR2b, and/or FGFR3b).

[0121] Accordingly, the antibodies described herein exhibit one or more of the following properties:

[0122] (a) binds to human FGFR1c, FGFR2c, FGFR3c, and/or FGFR4;

[0123] (b) does not bind to FGFR1b, FGFR2b, and/or FGFR3b , as assessed by ELISA or bio-layer interferometry (e.g., ForteBio assay);

[0124] (c) inhibits the binding of FGF1 or FGF2 to FGFR1c, FGFR2c, FGFR3c, and/or FGFR4;

[0125] (d) inhibits FGF2-mediated phosphorylation of ERK; and

[0126] (e) inhibits FGF2-mediated cell viability.

[0127] In some embodiments, the anti-FGFR antibodies bind to FGFR1c, FGFR2c, FGFR3c, or FGFR4c. In some embodiments, the anti-FGFR4 antibodies described herein bind to two FGFR proteins, i.e., FGFR1c and FGFR2c; FGFR1c and FGFR3c, FGFR1c and FGFR4; FGFR2c and FGFR3c; FGFR2c and FGFR4; or FGFR3c and FGFR4. In some embodiments, the anti-FGFR4 antibodies described herein bind to three FGFR proteins, i.e., FGFR1c, FGFR2c, and FGFR3c; FGFR1c, FGFR2c, and FGFR4; or FGFR2c, FGFR3c, and FGFR4. In some embodiments, the anti-FGFR antibodies described herein bind to FGFR1c, FGFR2c, FGFR3c, and FGFR4.

[0128] In some embodiments, the anti-FGFR antibodies described herein bind to the extracellular domain of FGFR1c (e.g., human FGFR1c), for example, with a K_{D} of 10⁻⁷ M or less, 10⁻⁸ M or less, 10⁻⁹ M or less, 10⁻¹⁰ M or less, 10⁻¹¹ M or less, 10⁻¹² M or less, 10⁻¹² M to 10⁻⁷ M, 10⁻¹¹ M to 10⁻⁷ M, 10⁻¹⁰ M to 10⁻⁷ M, or 10⁻⁹ M to 10⁻⁷ M, as assessed by, e.g., the ForteBio assay described in Example 9.

[0129] In some embodiments, the anti-FGFR antibodies described herein bind to the extracellular domain of FGFR2c (e.g., human FGFR2c), for example, with a K_{D} of 10⁻⁷ M or less, 10⁻⁸ M or less, 10⁻⁹ M or less, 10⁻¹⁰ M or less, 10⁻¹¹ M or less, 10⁻¹² M or less, 10⁻¹² M to 10⁻⁷ M, 10⁻¹¹ M to 10⁻⁷ M, 10⁻¹⁰ M to 10⁻⁷ M, or 10⁻⁹ M to 10⁻⁷ M, as assessed by, e.g., bio-layer interferometry (e.g., ForteBio assay) as described in Example 9.

[0130] In some embodiments, the anti-FGFR antibodies described herein bind to the extracellular domain of FGFR3c (e.g., human FGFR3c), for example, with a K_{D} of 10⁻⁷ M or less, 10⁻⁸ M or less, 10⁻⁹ M or less, 10⁻¹⁰ M or less, 10⁻¹¹ M or less, 10⁻¹² M or less, 10⁻¹² M to 10⁻⁷ M, 10⁻¹¹ M to 10⁻⁷ M, 10⁻¹⁰ M to 10⁻⁷ M, or 10⁻⁹ M to 10⁻⁷ M, as assessed by, e.g., bio-layer interferometry (e.g., ForteBio assay) as described in Example 9.

[0131] In some embodiments, the anti-FGFR antibodies described herein bind to the extracellular domain of FGFR4 (e.g., human FGFR4), for example, with a K_{D} of 10⁻⁷ M or less, 10⁻⁸ M or less, 10⁻⁹ M or less, 10⁻¹⁰ M or less, 10⁻¹¹ M or less, 10⁻¹² M or less, 10⁻¹² M to 10⁻⁷ M, 10⁻¹¹ M to 10⁻⁷ M, 10⁻¹⁰ M to 10⁻⁷ M, or 10⁻⁹ M to 10⁻⁷ M, as assessed by, e.g., bio-layer interferometry (e.g., ForteBio assay) as described in Example 9.

[0132] In some embodiments, the anti-FGFR antibodies described herein bind to the extracellular domain of FGFR1c (e.g., human FGFR1c), for example, with an EC50 of about 200 nM or less, e.g., 150 nM or less, 100 nM or less, 75 nM or less, 50 nM or less, 25 nM or less, 10 nM or less, 5 nM or less, 2.5 nM or less, 1 nM or less, 0.5 nM or less, 0.25 nM or less, 0.1 nM or less, 0.075 nM or less, 0.05 nM or less, 0.01 nM or less, 0.0075 nM or less, 0.005 nM or less, 0.001 nM or less, 200 nM to 0.001 nM, 150 nM to 0.001 nM, 100 nM to 0.005 nM, 50 nM to 0.005 nM or less, or 25 nM to 0.005 nM, as assessed by, e.g., ELISA as described in Example 3.

[0133] In some embodiments, the anti-FGFR antibodies described herein bind to the extracellular domain of FGFR2c (e.g., human FGFR2c), for example, with an EC50 of about 200 nM or less, e.g., 150 nM or less, 100 nM or less, 75 nM or less, 50 nM or less, 25 nM or less, 10 nM or less, 5 nM or less, 2.5 nM or less, 1 nM or less, 0.5 nM or less, 0.25 nM or less, 0.1 nM or less, 0.075 nM or less, 0.05 nM or less, 0.01 nM or less, 0.0075 nM or less, 0.005 nM or less, 0.001 nM or less, 200 nM to 0.001 nM, 150 nM to 0.001 nM, 100 nM to 0.005 nM, 50 nM to 0.005 nM or less, or 25 nM to 0.005 nM, as assessed by, e.g., ELISA as described in Example 3.

[0134] In some embodiments, the anti-FGFR antibodies described herein bind to the extracellular domain of FGFR3c (e.g., human FGFR3c), for example, with an EC50 of about 200 nM or less, e.g., 150 nM or less, 100 nM or less, 75 nM or less, 50 nM or less, 25 nM or less, 10 nM or less, 5 nM or less, 2.5 nM or less, 1 nM or less, 0.5 nM or less, 0.25 nM or less, 0.1 nM or less, 0.075 nM or less, 0.05 nM or less, 0.01 nM or less, 0.0075 nM or less, 0.005 nM or less, 0.001 nM or less, 200 nM to 0.001 nM, 150 nM to 0.001 nM, 100 nM to 0.005 nM, 50 nM to 0.005 nM or less, or 25 nM to 0.005 nM, as assessed by, e.g., ELISA as described in Example 3.

[0135] In some embodiments, the anti-FGFR antibodies described herein bind to the extracellular domain of FGFR4 (e.g., human FGFR4), for example, with an EC50 of about 200 nM or less, e.g., 150 nM or less, 100 nM or less, 75 nM or less, 50 nM or less, 25 nM or less, 10 nM or less, 5 nM or less, 2.5 nM or less, 1 nM or less, 0.5 nM or less, 0.25 nM or less, 0.1 nM or less, 0.075 nM or less, 0.05 nM or less, 0.01 nM or less, 0.0075 nM or less, 0.005 nM or less, 0.001 nM or less, 200 nM to 0.001 nM, 150 nM to 0.001 nM, 100 nM to 0.005 nM, 50 nM to 0.005 nM or less, or 25 nM to 0.005 nM, as assessed by, e.g., ELISA as described in Example 3.

[0136] In some embodiments, the anti-FGFR antibodies described herein do not bind to FGFR1b, FGFR2b, and/or FGFR3b (e.g., human FGFR1b, FGFR2b, and/or FGFR3b), as assessed by ELISA or bio-layer interferometry (e.g., ForteBio assay). Accordingly, in some embodiments, the anti-FGFR antibodies described herein do not bind to FGFR1b, FGFR2b, or FGFR3b. In some embodiments, the anti-FGFR antibodies described herein do not bind to FGFR1b and FGFR2b; FGFR1b and FGFR3b; or FGFR2b and FGFR3b. In some embodiments, the anti-FGFR antibodies described herein do not bind to FGFR1b, FGFR2b, and FGFR3b. In some embodiments, the anti-FGFR antibodies described herein do not bind to human FGFR1b, human FGFR2b, and FGFR3b. Accordingly, in a particular embodiment, the anti-FGFR antibodies described herein bind to human FGFR1c, FGFR2c, FGFR3c, and FGFR4, and do not bind to human FGFR1b, FGFR2b, and FGFR3b.

[0137] In some embodiments, the anti-FGFR antibodies described herein may inhibit binding of human FGF1 or FGF2 to human FGFR1c, FGFR2c, FGFR3c, and/or FGFR4 with an IC₅₀ of 500 nM or less, for example, 400 nM or less, 300 nM or less, 200 nM or less, 150 nM or less, 100 nM or less, 75 nM or less, 50 nM or less, 25 nM or less, 20 nM or less, 10 nM or less, 5 nM or less, 1 nM or less, 0.5 nM or less, 0.1 nM or less, 0.05 nM or less, 0.01 nM or less, 0.005 nM or less, 0.001 nM or less, 500 nM to 0.001 nM, 400 nM to 0.001 nM, 300 nM to 0.05 nM, 200 nM to 0.05 nM, or 150 nM to 0.5 nM (see Example 6).

[0138] In some embodiments, the anti-FGFR antibodies described herein inhibit signaling downstream of FGFRs, for example, FGF2-mediated phosphorylation of ERK. Accordingly, in some embodiments, the antibodies described herein inhibit FGF2-mediated phosphorylation with an IC50 of 200 nM or less, for example, 150 nM or less, 100 nM or less, 75 nM or less, 50 nM or less, 25 nM or less, 20 nM or less, 15 nM or less, 10 nM or less, 5 nM or less, 1 nM or less, 0.5 nM or less, 0.1 nM or less, 0.05 nM or less, 0.01 nM or less, 100 nM to 0.01 nM, 50 nM to 0.05 nM, 25 nM to 0.05 nM, 10 nM to 0.05 nM, as determined by, e.g., pERK SureFire Assay(see Example 7).

[0139] In some embodiments, the anti-FGFR antibodies described herein inhibit viability of tumor cells (e.g., a tumor cell line such as IGROV-1 cells) with an IC50 of 200 nM or less, for example, 150 nM or less, 100 nM or less, 75 nM or less, 50 nM or less, 25 nM or less, 20 nM or less, 15 nM or less, 10 nM or less, 5 nM or less, 1 nM or less, 0.5 nM or less, 0.1 nM or less, 0.05 nM or less, 0.01 nM or less, 200 nM to 0.1 nM, 150 nM to 0.5 nM, 100 nM to 1 nM, 50 nM to 1 nM, as determined by, e.g., the CellTiterGlo (CTG) assay described in Example 8.

[0140] In some embodiments, the anti-FGFR antibodies described herein has a serum half-life of 25 hour or more, 50 hours or more, 100 hours or more, 150 hours or more, 200 hours or more, 250 hours or more, 300 hours or more, 350 hours or more, 400 hours or more, or longer in mice when administered intravenously at a single dose of 40 mg/kg.

[0141] In one embodiment, provided herein is a modified antibody (e.g., an antibody with an IgG2 constant region or variant thereof) that binds to FGFR1c, wherein the antibody exhibits increased tolerability as compared to an antibody comprising identical heavy and light chain variable region sequences and an IgG1 constant region when administered to a mammal (e.g., a mouse or human). In certain embodiments, the reduction in weight loss when the antibody is administered is about 10% or less, for example, about 9% or less, about 8% or less, about 7% or less, about 6% or less, about 5% or less, about 4% or less, about 3% or less, about 2% or less, or about 1% or less, relative to the weight loss observed for the same antibody in IgG1 form.

[0142] In another embodiment, provided herein is a modified antibody that binds to FGFR1c, wherein administration of the antibody to a mammal (e.g., a mouse or human) does not result in significant weight loss.

[0143] An antibody that exhibits one or more of the functional properties described above (e.g., biochemical, immunochemical, cellular, physiological or other biological activities, or the like) as determined according to methodologies known to the art and described herein, will be understood to relate to a statistically significant difference in the particular activity relative to that seen in the absence of the antibody (e.g., or when a control antibody of irrelevant specificity is present). Preferably, the anti-FGFR antibody-induced increases in a measured parameter effects a statistically significant increase by at least 10% of the measured parameter, more preferably by at least 20%, 30%, 40%, 50%, 60%, 70%, 80%, 90%, 95%, or 100% (i.e, 2 fold), 3 fold, 5 fold or 10 fold. Conversely, anti-FGFR antibody-induced decreases in a measured parameter (e.g., tumor volume, FGF1 binding to FGFR1c, FGFR2c, FGFR3c, and/or FGFR4) effects a statistically significant decrease by at least 10%, 20%, 30%, 40%, 50%, 60%, 70%, 80%, 90%, 95%, 97%, 98%, 99%, or 100%.

[0144] Also provided herein are antibodies which bind to particular isoforms of FGFRs, e.g., FGFR1c, FGFR2c, FGFR3c, and/or FGFR4, and have particular variable region or CDR sequences, as described below. In some embodiments, the antibodies do not bind to FGFR1b, FGFR2b, and/or FGFR3b. In some embodiments, the antibodies described herein bind to FGFR1c, FGFR2c, FGFR3c, and/or FGFR4, and do not bind to FGFR1b, FGFR2b, and/or FGFR3b.

[0145] Accordingly, in some embodiments, the antibodies described herein comprise the heavy and light chain variable region sequences or CDR sequences of any of Ab1-Ab107 (as described in Table 9). The VH sequences of Ab1-Ab107 are set forth in SEQ ID NOs: 29; 40; 51; 62; 73; 84; 95; 106; 117; 128; 139; 150; 161; 172; 183; 194; 204; 214; 224; 234; 244; 254; 264; 274; 284; 294; 304; 314; 324; 334; 344; 354; 364; 374; 384; 394; 404; 414; 424; 434; 444; 454; 464; 474; 484; 494; 504; 514; 524; 534; 544; 554; 564; 574; 584; 594; 604; 614; 624; 634; 644; 654; 664; 674; 684; 694; 704; 714; 724; 734; 744; 754; 764; 774; 784; 794; 804; 814; 824; 834; 844; 854; 864; 874; 884 ; 894; 904; 914; 924; 934; 944; 954; 964; 974; 984; 994; 1004; 1014; 1024; 1034; 1044; 1054; 1064; 1074; 1084; 1094; and 1104, respectively. The VL sequences of Ab1-Ab107 are set forth in SEQ ID NOs: 30; 41; 52; 63; 74; 85; 96; 107; 118; 129; 140; 151; 162; 173; 184; 195; 205; 215; 225; 235; 245; 255; 265; 275; 285; 295; 305; 315; 325; 335; 345; 355; 365; 375; 385; 395; 405; 415; 425; 435; 445; 455; 465; 475; 485; 495; 505; 515; 525; 535; 545; 555; 565; 575; 585; 595; 605; 615; 625; 635; 645; 655; 665; 675; 685; 695; 705; 715; 725; 735; 745; 755; 765; 775; 785; 795; 805; 815; 825; 835; 845; 855; 865; 875; 885; 895; 905; 915; 925; 935; 945; 955; 965; 975; 985; 995; 1005; 1015; 1025; 1035; 1045; 1055; 1065; 1075; 1085; 1095; and 1105, respectively.

[0146] In one embodiment, provided herein are anti-FGFR antibodies comprising heavy and light chain CDR1, CDR2, and CDR3 sequences, wherein the heavy and light chain CDR1, CDR2, and CDR3 sequences are selected from the group consisting of SEQ ID NOs: 23-25 and 26-28, respectively; 34-36 and 37-39; 45-47 and 48-50; 56-58 and 59-61, 67-69 and 70-72; 78-80 and 81-83; 89-91 and 92-94; 100-102 and 103-105; 111-113 and 114-116; 122-124 and 125-127; 133-135 and 136-138; 144-146 and 147-149; 155-157 and 158-160, 166-168 and 169-171; 177-179 and 180-182; 188-190 and 191-193; 198-200 and 201-203; 208-210 and 211-213; 218-220 and 221-223; 228-230 and 231-233; 238-240 and 241-243; 248-250 and 251-253; 258-260 and 261-263; 268-270 and 271-273; 278-280 and 281-283; 288-290 and 291-293; 298-300 and 301-303; 308-310 and 311-313; 318-320 and 321-323; 228-330 and 331-333; 338-340 and 341-343; 348-350 and 351-353; 358-360 and 361-363; 368-370 and 371-373; 378-380 and 381-383; 388-390 and 391-393; 398-400 and 401-403; 408-410 and 411-413; 418-420 and 421-423; 428-430 and 431-433; 438-440 and 441-443; 448-450 and 451-453; 458-460 and 461-463; 468-470 and 471-473; 478-480 and 481-483; 488-490 and 491-493; 498-500 and 501-503; 508-510 and 511-513; 518-520 and 521-523; 528-530 and 531-533; 538-540 and 541-543; 548-550 and 551-553; 558-560 and 561-563; 568-570 and 571-573; 578-580 and 581-583; 588-590 and 591-593; 598-600 and 601-603; 608-610 and 611-613; 618-620 and 621-623; 628-630 and 631-633; 638-640 and 641-643; 648-650 and 651-653; 658-660 and 661-663; 668-670 and 671-673; 678-680 and 681-683; 688-690 and 691-693; 698-700 and 701-703; 708-710 and 711-713; 718-720 and 721-723; 728-730 and 731-733; 738-740 and 741-743; 748-750 and 751-753; 758-760 and 761-763; 768-770 and 771-773; 778-780 and 781-783; 788-790 and 791-793; 798-800 and 801-803; 808-810 and 811-813; 818-820 and 821-823; 828-830 and 831-833; 838-840 and 841-843; 848-850 and 851-853; 858-860 and 861-863; 868-870 and 871-873; 878-880 and 881-883; 888-890 and 891-893; 898-900 and 901-903; 908-910 and 911-913; 918-920 and 921-923; 928-930 and 931-933; 938-940 and 941-943; 948-950 and 951-953; 958-960 and 961-963; 968-970 and 971-973; 978-980 and 981-983; 988-990 and 991-993; 998-1000 and 1001-1003; 1008-1010 and 1011-1013; 1018-1020 and 1021-1023; 1028-1030 and 1031-1033; 1038-1040 and 1041-1043; 1048-1050 and 1051-1053; 1058-1060 and 1061-1063; 1068-1070 and 1071-1073; 1078-1080 and 1081-1083; 1088-1090 and 1091-1093; and 1098-1100 and 1101-1103, wherein the antibody specifically binds to FGFR1c, FGFR2c, FGFR3c, and/or FGFR4. In another embodiment, provided herein are isolated monoclonal antibodies, or antigen-binding portions thereof, which specifically bind to FGFR1c, FGFR2c, FGFR3c, and/or FGFR4, and comprise IMGT heavy chain CDR1, CDR2, and CDR3 sequences and IMGT light chain CDR1, CDR2, and CDR3 sequences selected from the group consisting of SEQ ID NOs: 1544-1546 and 1547-1549; 1550-1552 and 1553-1555; 1556-1558 and 1559-1561; 1562-1564 and 1565-1567; 1568-1570 and 1571-1573; ;1574-1576 and 1577-1579; 1580-1582 and 1583-1585; 1586-1588 and 1589-1591; 1592-1594 and 1595-1597; 1598-1600 and 1601-1603; 1604-1606 and 1607-1609; 1610-1612 and 1613-1615; 1616-1618 and 1619-1621; 1622-1624 and 1625-1627; 1628-1630 and 1631-1633; 1634-1636 and 1637-1639; 1640-1642 and 1643-1645; 1646-1648 and 1649-1651; 1652-1654 and 1655-1657; 1658-1660 and 1661-1663; 1664-1666 and 1667-1669; 1670-1672 and 1673-1675; 1676-1678 and 1679-1681; 1682-1684 and 1685-1687; 1688-1690 and 1691-1693; 1694-1696 and 1697-1699; 1700-1702 and 1703-1705; 1706-1708 and 1709-1711; 1712-1714 and 1715-1717; 1718-1720 and 1721-1723; 1724-1726 and 1727-1729; 1730-1732 and 1733-1735; 1736-1738 and 1739-1741; 1742-1744 and 1745-1747; 1748-1750 and 1751-1753; 1754-1756 and 1757-1759; 1760-1762 and 1763-1765; 1766-1768 and 1769-1771; 1772-1774 and 1775-1777; 1778-1780 and 1781-1783; 1784-1786 and 1787-1789; 1790-1792 and 1793-1795; 1796-1798 and 1799-1801; 1802-1804 and 1805-1807; 1808-1810 and 1811-1813; 1814-1816 and 1817-1819; 1820-1822 and 1823-1825; 1826-1828 and 1829-1831; 1832-1834 and 1835-1837; 1838-1840 and 1841-1843; 1844-1846 and 1847-1849; 1850-1852 and 1853-1855; 1856-1858 and 1859-1861; 1862-1864 and 1865-1867; 1868-1870 and 1871-1873; 1874-1876 and 1877-1879; 1880-1882 and 1883-1885; 1886-1888 and 1889-1891; 1892-1894 and 1895-1897; 1898-1900 and 1901-1903; 1904-1906 and 1907-1909; 1910-1912 and 1913-1915; 1916-1918 and 1919-1921; 1922-1924 and 1925-1927; 1928-1930 and 1931-1933; 1934-1936 and 1937-1939; 1940-1942 and 1943-1945; 1946-1948 and 1949-1951; 1952-1954 and 1955-1957; 1958-1960 and 1961-1963; 1964-1966 and 1967-1969; 1970-1972 and 1973-1975; 1976-1978 and 1979-1981; 1982-1984 and 1985-1987; 1988-1990 and 1991-1993; 1994-1996 and 1997-1999; 2000-2002 and 2003-2005; 2006-2008 and 2009-2011; 2012-2014 and 2015-2017; 2018-2020 and 2021-2023; 2024-2026 and 2027-2029; 2030-2032 and 2033-2035; 2036-2038 and 2039-2041; 2042-2044 and 2045-2047; 2048-2050 and 2051-2053; 2054-2056 and 2057-2059; 2060-2062 and 2063-2065; 2066-2068 and 2069-2071; 2072-2074 and 2075-2077; 2078-2080 and 2081-2083; 2084-2086 and 2087-2089; 2090-2092 and 2093-2095; 2096-2098 and 2099-2101; 2102-2104 and 2105-2107; 2108-2110 and 2111-2113; 2114-2116 and 2117-2119; 2120-2122 and 2123-2125; 2126-2128 and 2129-2131; 2132-2134 and 2135-2137; 2138-2140 and 2141-2143; 2144-2146 and 2147-2149; 2150-2152 and 2153-2155; 2156-2158 and 2159-2161; 2162-2164 and 2165-2167; 2168-2170 and 2171-2173; 2174-2176 and 2177-2179; and 2180-2182 and 2183-2185. In some embodiments, the antibody does not bind to FGFR1b, FGFR2b, and/or FGFR3b. In these lists, the first set of numbers within a pair of semicolons correspond to the heavy chain CDR1, CDR2, and CDR3 sequences and the second set of numbers following the term “and” correspond to the light chain CDR1, CDR2, and CDR3 sequences. For example, “; 34-36 and 37-39;” in the list above indicates that the antibody comprises heavy chain CDR1, CDR2, and CDR3 sequences set forth in SEQ ID NOs: 34-36, respectively, and light chain CDR1, CDR2, and CDR3 sequences set forth in SEQ ID NOs: 37-39, respectively.

[0147] In another embodiment, provided herein are isolated monoclonal antibodies, or antigen-binding portions thereof, which bind to FGFR1c, FGFR2c, FGFR3c, and/or FGFR4, and comprise heavy and light chain variable regions, wherein the heavy chain variable region comprises heavy chain CDR1, CDR2, and CDR3 sequences set forth in SEQ ID NOs: 1108-1110 or 1112-1114, or IMGT heavy chain CDR1, CDR2, and CDR3 sequences set forth in SEQ ID NOs: 2186-2188 or 2189-2191. In some embodiments, the antibodies do not bind to FGFR1b, FGFR2b, and/or FGFR3b. In some embodiments, the heavy chain variable region is paired with a light chain variable region comprising light chain CDR1, CDR2, and CDR3 sequences selected from the group consisting of SEQ ID NOs: 1116-1118; 1120-1122; 1124-1126; 1128-1130; 1132-1134; 1136-1138; 1140-1142; 1144-1146; 1148-1150; 1152-1154; 1156-1158; 1160-1162; and 1164-1166. In some embodiments, the heavy chain variable region is paired with a light chain variable region comprising IMGT light chain CDR1, CDR2, and CDR3 sequences selected from the group consisting of SEQ ID NOs: 2192-2194; 2195-2197; 2198-2200; 2201-2203; 2204-2206; 2207-2209; 2210-2212; 2213-2215; 2216-2218; 2219-2221; 2222-2224; 2225-2227; and 2228-2230.

[0148] In another embodiment, provided herein are isolated monoclonal antibodies, or antigen-binding portions thereof, which bind to FGFR1c, FGFR2c, FGFR3c, and/or FGFR4, and comprise heavy and light chain variable regions, wherein the light chain variable region comprises light chain CDR1, CDR2, and CDR3 sequences set forth in SEQ ID NOs: 1116-1118; 1120-1122; 1124-1126; 1128-1130; 1132-1134; 1136-1138; 1140-1142; 1144-1146; 1148-1150; 1152-1154; 1156-1158; 1160-1162; and 1164-1166, or IMGT light chain CDR1, CDR2, and CDR3 sequences set forth in SEQ ID NOs: 2192-2194; 2195-2197; 2198-2200; 2201-2203; 2204-2206; 2207-2209; 2210-2212; 2213-2215; 2216-2218; 2219-2221; 2222-2224; 2225-2227; and 2228-2230. In some embodiments, the antibodies do not bind to FGFR1b, FGFR2b, and/or FGFR3b. In some embodiments, the light chain variable region is paired with a heavy chain variable region comprising heavy chain CDR1, CDR2, and CDR3 sequences set forth in SEQ ID NOs: 1108-1110 or 1112-1114. In some embodiments, the light chain variable region is paired with a heavy chain variable region comprising IMGT heavy chain CDR1, CDR2, and CDR3 sequences set forth in SEQ ID NOs: 2186-2188 or 2189-2191.

[0149] In another embodiment, provided herein are anti-FGFR antibodies comprising heavy and light chain variable regions, wherein the heavy chain variable region comprises an amino acid sequence selected from the group consisting of SEQ ID NOs: 29; 40; 51; 62; 73; 84; 95; 106; 117; 128; 139; 150; 161; 172; 183; 194; 204; 214; 224; 234; 244; 254; 264; 274; 284; 294; 304; 314; 324; 334; 344; 354; 364; 374; 384; 394; 404; 414; 424; 434; 444; 454; 464; 474; 484; 494; 504; 514; 524; 534; 544; 554; 564; 574; 584; 594; 604; 614; 624; 634; 644; 654; 664; 674; 684; 694; 704; 714; 724; 734; 744; 754; 764; 774; 784; 794; 804; 814; 824; 834; 844; 854; 864; 874; 884 ; 894; 904; 914; 924; 934; 944; 954; 964; 974; 984; 994; 1004; 1014; 1024; 1034; 1044; 1054; 1064; 1074; 1084; 1094; 1104; 1111; and 1115, wherein the antibody specifically binds to FGFR1c, FGFR2c, FGFR3c, and/or FGFR4. In some embodiments, the antibody does not bind to FGFR1b, FGFR2b, and/or FGFR3b.

[0150] In another embodiment, provided herein are anti-FGFR antibodies comprising heavy and light chain variable regions, wherein the light chain variable region comprises an amino acid sequence selected from the group consisting of SEQ ID NOs: 30; 41; 52; 63; 74; 85; 96; 107; 118; 129; 140; 151; 162; 173; 184; 195; 205; 215; 225; 235; 245; 255; 265; 275; 285; 295; 305; 315; 325; 335; 345; 355; 365; 375; 385; 395; 405; 415; 425; 435; 445; 455; 465; 475; 485; 495; 505; 515; 525; 535; 545; 555; 565; 575; 585; 595; 605; 615; 625; 635; 645; 655; 665; 675; 685; 695; 705; 715; 725; 735; 745; 755; 765; 775; 785; 795; 805; 815; 825; 835; 845; 855; 865; 875; 885; 895; 905; 915; 925; 935; 945; 955; 965; 975; 985; 995; 1005; 1015; 1025; 1035; 1045; 1055; 1065; 1075; 1085; 1095; 1105; 1119; 1123; 1127; 1131; 1135; 1139; 1143; 1147; 1151; 1155; 1159; 1163; and 1167, wherein the antibody specifically binds to FGFR1c, FGFR2c, FGFR3c, and/or FGFR4. In some embodiments, the antibody does not bind to FGFR1b, FGFR2b, and/or FGFR3b.

[0151] In one embodiment, provided herein are anti-FGFR antibodies comprising heavy and light chain variable region sequences comprising SEQ ID NOs: 29 and 30; 40 and 41; 51 and 52; 62 and 63; 73 and 74; 84 and 85; 95 and 96; 106 and 107; 117 and 118; 128 and 129; 139 and 140; 150 and 151; 161 and 162; 172 and 173; 183 and 184; 194 and 195; 204 and 205; 214 and 215; 224 and 225; 234 and 235; 244 and 245; 254 and 255; 264 and 265; 274 and 275; 284 and 285; 294 and 295; 304 and 305; 314 and 315; 324 and 325; 334 and 335; 344 and 345; 354 and 355; 364 and 365; 374 and 375; 384 and 385; 394 and 395; 404 and 405; 414 and 415; 424 and 425; 434 and 435; 444 and 445; 454 and 455; 464 and 465; 474 and 475; 484 and 485; 494 and 495; 504 and 505; 514 and 515; 524 and 525; 534 and 535; 544 and 545; 554 and 555; 564 and 565; 574 and 575; 584 and 585; 594 and 595; 604 and 605; 614 and 615; 624 and 625; 634 and 635; 644 and 645; 654 and 655; 664 and 665; 674 and 675; 684 and 685; 694 and 695; 704 and 705; 714 and 715; 724 and 725; 734 and 735; 744 and 745; 754 and 755; 764 and 765; 774 and 775; 784 and 785; 794 and 795; 804 and 805; 814 and 815; 824 and 825; 834 and 835; 844 and 845; 854 and 855; 864 and 865; 874 and 875; 884 and 885; 894 and 895; 904 and 905; 914 and 915; 924 and 925; 934 and 935; 944 and 945; 954 and 955; 964 and 965; 974 and 975; 984 and 985; 994 and 995; 1004 and 1005; 1014 and 1015; 1024 and 1025; 1034 and 1035; 1044 and 1045; 1054 and 1055; 1064 and 1065; 1074 and 1075; 1084 and 1085; 1094 and 1095; and 1104 and 1105, wherein the antibody specifically binds to FGFR1c, FGFR2c, FGFR3c, and/or FGFR4. In some embodiments, the antibody does not bind to FGFR1b, FGFR2b, and/or FGFR3b. In this list, the first number within a pair of semicolons correspond to the heavy chain variable region sequence, and the second number following the term “and” corresponds to the light chain variable region sequence. For example, “; 40 and 41;” in the list above indicates that the antibody comprises a heavy chain variable region comprising the amino acid sequence set forth in SEQ ID NO: 40, and a light chain variable region comprising the amino acid sequence set forth in SEQ ID NO: 41.

[0152] In one embodiment, provided herein are anti-FGFR antibodies comprising or consisting of heavy and light chain sequences selected from the group consisting of SEQ ID NOs: 32 and 33; 43 and 44; 54 and 55; 65 and 66; 76 and 77; 87 and 88; 98 and 99; 109 and 110; 120 and 121; 131 and 132; 142 and 143; 153 and 154; 164 and 165; 175 and 176; 186 and 187; 196 and 197; 206 and 207; 216 and 217; 226 and 227; 236 and 237; 246 and 247; 256 and 257; 266 and 267; 276 and 277; 286 and 287; 296 and 297; 306 and 307; 316 and 317; 326 and 327; 336 and 337; 346 and 347; 356 and 357; 366 and 367; 376 and 377; 386 and 387; 396 and 397; 406 and 407; 416 and 417; 426 and 427; 436 and 437; 446 and 447; 456 and 457; 466 and 467; 476 and 477; 486 and 487; 496 and 497; 506 and 507; 516 and 517; 526 and 527; 536 and 537; 546 and 547; 556 and 557; 566 and 567; 576 and 577; 586 and 587; 596 and 597; 606 and 607; 616 and 617; 626 and 627; 636 and 637; 646 and 647; 656 and 657; 666 and 667; 676 and 677; 686 and 687; 696 and 697; 706 and 707; 716 and 717; 726 and 727; 736 and 737; 746 and 747; 756 and 757; 766 and 767; 776 and 777; 786 and 787; 796 and 797; 806 and 807; 816 and 817; 826 and 827; 836 and 837; 846 and 847; 856 and 857; 866 and 867; 876 and 877; 886 and 887; 896 and 897; 906 and 907; 916 and 917; 926 and 927; 936 and 937; 946 and 947; 956 and 957; 966 and 967; 976 and 977; 986 and 987; 996 and 997; 1006 and 1007; 1016 and 1017; 1026 and 1027; 1036 and 1037; 1046 and 1047; 1056 and 1057; 1066 and 1067; 1076 and 1077; 1086 and 1087; 1096 and 1097; and 1106 and 1107. In this list, the first number within a pair of semicolons correspond to the heavy chain sequence, and the second number following the term “and” corresponds to the light chain sequence. For example, “; 43 and 44;” in the list above indicates that the antibody comprises a heavy chain comprising or consisting of the amino acid sequence set forth in SEQ ID NO: 40, and a light chain comprising or consisting of the amino acid sequence set forth in SEQ ID NO: 41.

[0153] In certain aspects, provided herein are antibodies (e.g., isolated monoclonal antibodies), and antigen-binding portions thereof, which bind to FGFR1c, FGFR2c, FGFR3c, and/or FGFR4, and comprise CDR sequences defined by consensus sequences.

[0154] Accordingly, in one embodiment, provided herein are antibodies (e.g., isolated monoclonal antibodies), or antigen-binding portions thereof, which bind to FGFR1c, FGFR2c, FGFR3c, and/or FGFR4, and comprise heavy chain CDR1, CDR2, and CDR3 sequences [SGHT][YH]A[MI]H (SEQ ID NO: 2231), [VL]ISYDGS[NE]KYYADS[VA]KG (SEQ ID NO: 2232), and GAG[RTLQHMI]G[YLFW][TPASIM][YNFHLWRK]GPDGDFI (SEQ ID NO: 2233), respectively, and light chain CDR1, CDR2, and CDR3 sequences [TRK]SS[RQE]SL[LVI][HWYF][SRGT]DG[KNI]TY[VL][YSN] (SEQ ID NO: 2234), [EKQ][LVI]S[NS]RFS (SEQ ID NO: 2235), and MQ[YA][IVTK][EQNR][AFL]P[LW]T (SEQ ID NO: 2236), respectively.

[0155] In another embodiment, provided herein are antibodies (e.g., isolated monoclonal antibodies), or antigen-binding portions thereof, which bind to FGFR1c, FGFR2c, FGFR3c, and/or FGFR4, and comprise heavy chain CDR1, CDR2, and CDR3 sequences [SG]YA[MI]H (SEQ ID NO: 2237), [VL]ISYDGSNKYYADS[VA]KG (SEQ ID NO: 2238), and GAG[RTLQHMI]G[YLFW][TPASIM][YNFHLWRK]GPDGDFI (SEQ ID NO: 2239), respectively, and light chain CDR1, CDR2, and CDR3 sequences [TRK]SS[RQE]SL[LV][HWY][SR]DG[KN]TY[VL][YS] (SEQ ID NO: 2240), [EK][LV]SNRFS (SEQ ID NO: 2241), and MQ[YA][IVT][EQ][AF]P[LW]T (SEQ ID NO: 2242), respectively.

[0156] In another embodiment, provided herein are antibodies (e.g., isolated monoclonal antibodies), or antigen-binding portions thereof, which bind to FGFR1c, FGFR2c, FGFR3c, and/or FGFR4, and comprise heavy chain CDR1, CDR2, and CDR3 sequences [SG]YAMH (SEQ ID NO: 2243), VISYDGSNKYYADSVKG (SEQ ID NO: 2244), and GAG[RTLQHMI]G[YLFW][TPASIM][YNFHLWRK]GPDGDFI (SEQ ID NO: 2245), respectively, and light chain CDR1, CDR2, and CDR3 sequences [TRK]SS[RQ]SLL[HW]SDGKTY[VL]Y (SEQ ID NO: 2246), ELSNRFS (SEQ ID NO: 2247), and MQY[IV]EAPLT (SEQ ID NO: 2248), respectively.

[0157] In another embodiment, provided herein are antibodies (e.g., isolated monoclonal antibodies), or antigen-binding portions thereof, which bind to FGFR1c, FGFR2c, FGFR3c, and/or FGFR4, and comprise IMGT heavy chain CDR1, CDR2, and CDR3 sequences GF[TSD]F[SGTA][SGHT][YH]A (SEQ ID NO: 2249), ISYDGS[NE]K (SEQ ID NO: 2250), and VRGAG[RTLQHMI]G[YLFW][TPASIM][YNFHLWRK]GPDGDFI (SEQ ID NO: 2251), respectively, and IMGT light chain CDR1, CDR2, and CDR3 sequences [RQE]SL[LVI][HWYF][SRGT]DG[KNI]TY (SEQ ID NO: 2252), [EKQ][LVI]S (SEQ ID NO: 2253), and MQ[YA][IVTK][EQNR][AFL]P[LW]T (SEQ ID NO: 2254), respectively.

[0158] In another embodiment, provided herein are antibodies (e.g., isolated monoclonal antibodies), or antigen-binding portions thereof, which bind to FGFR1c, FGFR2c, FGFR3c, and/or FGFR4, and comprise IMGT heavy chain CDR1, CDR2, and CDR3 sequences GF[TD]F[SA][SG]YA (SEQ ID NO: 2255), ISYDGSNK (SEQ ID NO: 2256), and VRGAG[RTLQHMI]G[YLFW][TPASIM][YNFHLWRK]GPDGDFI (SEQ ID NO: 2257), respectively, and IMGT light chain CDR1, CDR2, and CDR3 sequences [RQE]SL[LV][HWY][SR]DG[KN]TY (SEQ ID NO: 2258), [EK][LV]S (SEQ ID NO: 2259), and MQ[YA][IVT][EQ][AF]P[LW]T (SEQ ID NO: 2260), respectively.

[0159] In another embodiment, provided herein are antibodies (e.g., isolated monoclonal antibodies), or antigen-binding portions thereof, which bind to FGFR1c, FGFR2c, FGFR3c, and/or FGFR4, and comprise IMGT heavy chain CDR1, CDR2, and CDR3 sequences GF[TD]F[SA][SG]YA (SEQ ID NO: 2261), ISYDGSNK (SEQ ID NO: 2262), and VRGAG[RTLQHMI]G[YLFW][TPASIM][YNFHLWRK]GPDGDFI (SEQ ID NO: 2263), respectively, and IMGT light chain CDR1, CDR2, and CDR3 sequences [RQ]SLL[HW]SDGKTY (SEQ ID NO: 2264), ELS (SEQ ID NO: 2265), and MQY[IV]EAPLT (SEQ ID NO: 2266), respectively.

[0160] In some embodiments, the VH domain of Ab1, Ab2, Ab3, Ab4, Ab5, Ab6, Ab7, Ab8, Ab9, Ab10, Ab11, Ab12, Ab13, Ab14, Ab15, Ab16, Ab17, Ab18, Ab19, Ab20, Ab21, Ab22, Ab23, Ab24, Ab25, Ab26, Ab27, Ab28, Ab29, Ab30, Ab31, Ab32, Ab33, Ab34, Ab35, Ab36, Ab37, Ab38, Ab39, Ab40, Ab41, Ab42, Ab43, Ab44, Ab45, Ab46, Ab47, Ab48, Ab49, Ab50, Ab51, Ab52, Ab53, Ab54, Ab55, Ab56, Ab57, Ab58, Ab59, Ab60, Ab61, Ab62, Ab63, Ab64, Ab65, Ab66, Ab67, Ab68, Ab69, Ab70, Ab71, Ab72, Ab73, Ab74, Ab75, Ab76, Ab77, Ab78, Ab79, Ab80, Ab81, Ab82, Ab83, Ab84, Ab85, Ab86, Ab87, Ab88, Ab89, Ab90, Ab91, Ab92, Ab93, Ab94, Ab95, Ab96, Ab97, Ab98, Ab99, Ab100, Ab101, Ab102, Ab103, Ab104, Ab105, Ab106, or Ab107 (the sequences of which are provided in Table 9) is combined with Vk1 (SEQ ID NO: 1119), Vk2 (SEQ ID NO: 1123), Vk3 (SEQ ID NO: 1127), Vk4 (SEQ ID NO: 1131), Vk5 (SEQ ID NO: 1135), Vk6 (SEQ ID NO: 1139), Vk7 (SEQ ID NO: 1143), Vk8 (SEQ ID NO: 1147), Vk9 (SEQ ID NO: 1151), Vk10 (SEQ ID NO: 1155), Vk11 (SEQ ID NO: 1159), Vk12 (SEQ ID NO: 1163), or Vk13 (SEQ ID NO: 1167) to form an anti-FGFR antibody. All combinations are contemplated and are herein referred to as “VH of any of Ab1-Ab107 and any of Vk1-12” or “VH of any of Ab1-Ab107 combined with any of Vk1-12.”

[0161] In some embodiments, the VL domain of any of Ab1, Ab2, Ab3, Ab4, Ab5, Ab6, Ab7, Ab8, Ab9, Ab10, Ab11, Ab12, Ab13, Ab14, Ab15, Ab16, Ab17, Ab18, Ab19, Ab20, Ab21, Ab22, Ab23, Ab24, Ab25, Ab26, Ab27, Ab28, Ab29, Ab30, Ab31, Ab32, Ab33, Ab34, Ab35, Ab36, Ab37, Ab38, Ab39, Ab40, Ab41, Ab42, Ab43, Ab44, Ab45, Ab46, Ab47, Ab48, Ab49, Ab50, Ab51, Ab52, Ab53, Ab54, Ab55, Ab56, Ab57, Ab58, Ab59, Ab60, Ab61, Ab62, Ab63, Ab64, Ab65, Ab66, Ab67, Ab68, Ab69, Ab70, Ab71, Ab72, Ab73, Ab74, Ab75, Ab76, Ab77, Ab78, Ab79, Ab80, Ab81, Ab82, Ab83, Ab84, Ab85, Ab86, Ab87, Ab88, Ab89, Ab90, Ab91, Ab92, Ab93, Ab94, Ab95, Ab96, Ab97, Ab98, Ab99, Ab100, Ab101, Ab102, Ab103, Ab104, Ab105, Ab106, and Ab107 (the sequences of which are provided in Table 9) is combined with Vh1 (SEQ ID NO: 1111) or Vh2 (SEQ ID NO: 1115) to form an anti-FGFR antibody. All combinations of Ab1-Ab107 and Vh1 or Vh2 are contemplated, and are herein referred to as “Vh1 or Vh2 and VL of any of Ab1-Ab107” or “Vh1 or Vh2 combined with VL of any of Ab1-Ab107.”

[0162] In some embodiments, a VH domain described herein is linked to a constant domain to form a heavy chain, e.g., a full-length heavy chain. In some embodiments, the VH domain is linked to the constant domain of a human IgG, e.g., IgG1, IgG2, IgG3, or IgG4, or variants thereof. Similarly, a VL domain described herein is linked to a constant domain to form a light chain, e.g., a full-length light chain.

[0163] Also provided herein are anti-FGFR antibodies that compete for binding to FGFR proteins, e.g., FGFR1c, FGFR2c, FGFR3c, and/or FGFR4, with anti-FGFR antibodies comprising CDRs or variable regions described herein, e.g., those of any of Ab1-Ab107. In some embodiments, anti-FGFR antibodies inhibit binding of any of Ab1-Ab107 to human FGFR1c, FGFR2c, FGFR3c, and/or FGFR4 by at least 10%, 20%, 30%, 40%, 50%, 60%, 70%, 80%, 90% or by 100%. Competing antibodies can be identified based on their ability to competitively inhibit binding to FGFR proteins using standard binding assays known in the art (e.g., competitive ELISA assay).

[0164] Also provided herein are anti-FGFR antibodies which bind to the same epitope on FGFR1c, FGFR2c, FGFR3c, and/or FGFR4 with anti-FGFR antibodies comprising CDRs or variable regions described herein, e.g., those of any of Ab1-Ab107. Methods for determining whether antibodies bind to the same epitope on FGFR1c, FGFR2c, FGFR3c, and/or FGFR4 with the antibodies described herein include, for example, epitope mapping methods, monitoring the binding of the antibody to antigen fragments or mutated variations of the antigen where loss of binding due to a modification of an amino acid residue within the antigen sequence is considered an indication of an epitope component (e.g., alanine scanning); MS-based protein footprinting, and assessing the ability of an antibody of interest to affinity isolate specific short peptides (either in native three dimensional form or in denatured form) from combinatorial phage display peptide libraries.

[0165] Antibodies disclosed herein include all known forms of antibodies and other protein scaffolds with antibody-like properties. For example, the antibody can be a human antibody, a humanized antibody, a bispecific antibody, an immunoconjugate, a chimeric antibody, or a protein scaffold with antibody-like properties, such as fibronectin or ankyrin repeats. The antibody also can be a Fab, Fab′2, scFv, affibody®, avimer, nanobody, or a domain antibody. The antibody also can have any isotype, including any of the following isotypes: IgG1, IgG2, IgG3, IgG4, IgM, IgAl, IgA2, IgAsec, IgD, and IgE. IgG antibodies are preferred. Full-length antibodies can be prepared from V_{H} and V_{L} sequences using standard recombinant DNA techniques and nucleic acid encoding the desired constant region sequences to be operatively linked to the variable region sequences.

[0166] In various embodiments, the antibodies described above exhibit one or more (e.g., 1, 2, 3, 4, 5, or 6) of the following functional properties:

[0167] (a) binds to human FGFR1c, FGFR2c, FGFR3c, and/or FGFR4, e.g., with a K_{D} of 10⁻⁷ or less, 10⁻⁸ or less, or 10⁻⁹ or less for FGFR1c; 10⁻⁷ or less, 10⁻⁸ or less, or 10⁻⁹ or less for FGFR2c; 10⁻⁷ or less, 10⁻⁸ or less, or 10⁻⁹ or less for FGFR3c; and/or 10⁻⁷ or less, 10⁻⁸ or less, or 10⁻⁹ or less for FGFR4 when in IgG2 format (e.g., wild-type IgG2 constant region or a variant such as M7 (SEQ ID NO: 1173), e.g., as measured by bio-layer interferometry (e.g., the ForteBio assay described in Example 9);

[0168] (b) binds to human FGFR1c, FGFR2c, FGFR3c, and/or FGFR4, e.g., with an EC50 of, for example, 10 nM or less, 1 nM or less, or 0.05 nM or less for FGFR1c; 10 nM or less, 1 nM or less, or 0.05 nM or less for FGFR2c; 10 nM or less, 1 nM or less, or 0.5 nM or less for FGFR3c; and/or 50 nM or less, 25 nM or less, or 10 nM or less for FGFR4 when in IgG2 format (e.g., wild-type IgG2 constant region or a variant such as M7 (SEQ ID NO: 1173), e.g., as measured by ELISA (see, e.g., Examples 3 and 9);

[0169] (c) does not bind to human FGFR1b, FGFR2b, and/or FGFR3b , as measured by ELISA or bio-layer interferometry;

[0170] (d) inhibits the binding of FGF1 to FGFR1c, FGFR2c, FGFR3c, and/or FGFR4, e.g., with an EC50 of 200 nM or less, 150 nM or less, 50 nM or less, 25 nM or less, or 10 nM or less, e.g., as measured by ELISA (see, e.g., Example 9);

[0171] (e) inhibits FGF2-mediated phosphorylation of ERK, e.g., with an IC₅₀ of 50 or less, 25 nM or less, or 10 nM or less, as measured by SureFire Alpha assay (see, e.g., Example 7); and

[0172] (f) inhibits FGF2-mediated cell viability, e.g., with an IC₅₀ of 100 nM or less, 75 nM or less, 50 nM or less, 25 nM or less, or 10 nM or less, as assessed with CellTiterGlo (see Example 8).

[0173] Also provided herein is an antibody composition comprising one or more anti-FGFR antibodies which collectively bind to FGFR1c, FGFR2c, FGFR3c, and FGFR4, but not FGFR1b, FGFR2b, and/or FGFR3b. In one embodiment, the antibody composition comprises one or more anti-FGFR antibodies which collectively bind to FGFR1c, FGFR2c, FGFR3c, and FGFR4, but not FGFR1b, FGFR2b, and FGFR3b. In another embodiment, the antibody composition includes four antibodies, each of which bind to one of FGFR1c, FGFR2c, FGFR3c, and FGFR4, wherein none of the four antibodies bind to FGFR1b, FGFR2b, and/or FGFR3b. In another embodiment, the antibody composition includes three antibodies which collectively bind to FGFR1c, FGFR2c, FGFR3c, and FGFR4, wherein none of the three antibodies bind to FGFR1b, FGFR2b, and/or FGFR3b. In another embodiment, the antibody composition includes two antibodies which collectively bind to FGFR1c, FGFR2c, FGFR3c, and FGFR4, wherein neither of the antibodies bind to FGFR1b, FGFR2b, and/or FGFR3b. In another embodiment, the antibody composition includes an antibody which binds to all four of FGFR1c, FGFR2c, FGFR3c, and FGFR4, but does not bind to FGFR1b, FGFR2b, and/or FGFR3b.

Antibodies with Altered Sequence

[0174] In some embodiments, the variable region sequences, or portions thereof, of the anti-FGFR antibodies described herein are altered to create structurally-related anti-FGFR antibodies (i.e., altered antibodies) that retain binding and thus are functionally equivalent.

[0175] For example, amino acid residues within the V_{H} and/or V_{L} CDR1, CDR2 and/or CDR3 regions can be mutated to thereby improve one or more binding properties (e.g., affinity) of the antibody of interest. Site-directed mutagenesis or PCR-mediated mutagenesis can be performed to introduce the mutation(s) and the effect on antibody binding, or other functional property of interest, can be evaluated in in vitro or in vivo assays as described herein and provided in the Examples. Preferably conservative modifications (as discussed above) are introduced. The mutations may be amino acid substitutions, additions or deletions, but are preferably substitutions. Typically no more than one, two, three, four or five residues within a CDR region are altered.

[0176] Accordingly, in some embodiments, provided are anti-FGFR antibodies comprising VHCDR1, VHCDR2, VHCDR3, VLCDR1, VLCDR2, and/or VLCDR3 that differs from the corresponding CDR(s) of any of Ab1-Ab107 by 1, 2, 3, 4, 5, 1-2, 1-3, 1-4, or 1-5 amino acid changes (i.e., amino acid substitutions, additions, or deletions). In one embodiment, an anti-FGFR antibody comprises a total of 1-5 amino acid changes across all CDRs relative to the CDRs of any of Ab1-Ab107. In another embodiment, the anti-FGFR antibody comprises 1-5 amino acid changes in each of 6 CDRs relative to the corresponding CDRs of any of Ab1-Ab107. These altered antibodies can be tested, using the in vitro and in vivo assays described herein and in the Examples, to determine whether they retain one or more (e.g., 1, 2, 3, 4, 5, or 6) of the following properties:

[0177] (a) binds to human FGFR1c, FGFR2c, FGFR3c, and/or FGFR4, e.g., with a K_{D} of 10⁻⁷ or less, 10⁻⁸ or less, or 10⁻⁹ or less for FGFR1c; 10⁻⁷ or less, 10⁻⁸ or less, or 10⁻⁹ or less for FGFR2c; 10⁻⁷ or less, 10⁻⁸ or less, or 10⁻⁹ or less for FGFR3c; and/or 10⁻⁷ or less, 10⁻⁸ or less, or 10⁻⁹ or less for FGFR4 when in IgG2 format (e.g., wild-type IgG2 constant region or a variant such as M7 (SEQ ID NO: 1173), e.g., as measured by bio-layer interferometry (e.g., the ForteBio assay described in Example 9);

[0178] (b) binds to human FGFR1c, FGFR2c, FGFR3c, and/or FGFR4, e.g., with an EC50 of, for example, 10 nM or less, 1 nM or less, or 0.05 nM or less for FGFR1c; 10 nM or less, 1 nM or less, or 0.05 nM or less for FGFR2c; 10 nM or less, 1 nM or less, or 0.5 nM or less for FGFR3c; and/or 50 nM or less, 25 nM or less, or 10 nM or less for FGFR4 when in IgG2 format (e.g., wild-type IgG2 constant region or a variant such as M7 (SEQ ID NO: 1173), e.g., as measured by ELISA (see, e.g., Examples 3 and 9);

[0179] (c) does not bind to human FGFR1b, FGFR2b, and/or FGFR3b, as measured by ELISA or bio-layer interferometry;

[0180] (d) inhibits the binding of FGF1 to FGFR1c, FGFR2c, FGFR3c, and/or FGFR4, e.g., with an EC50 of 200 nM or less, 150 nM or less, 50 nM or less, 25 nM or less, or 10 nM or less, e.g., as measured by ELISA (see, e.g., Example 9);

[0181] (e) inhibits FGF2-mediated phosphorylation of ERK, e.g., with an IC₅₀ of 50 or less, 25 nM or less, or 10 nM or less, as measured by SureFire Alpha assay (see Example 7); and

[0182] (f) inhibits FGF2-mediated cell viability, e.g., with an IC₅₀ of 100 nM or less, 75 nM or less, 50 nM or less, 25 nM or less, or 10 nM or less, as assessed with CellTiterGlo (see, e.g., Example 8).

[0183] In some embodiments, provided are anti-FGFR antibodies comprising heavy and light chain variable regions, wherein the heavy chain variable region comprises an amino acid sequence which is at least 80%, 85%, 90%, 95%, 96%, 97%, 98%, or 99% identical to an amino acid sequence selected from the group consisting of SEQ ID NOs: 29; 40; 51; 62; 73; 84; 95; 106; 117; 128; 139; 150; 161; 172; 183; 194; 204; 214; 224; 234; 244; 254; 264; 274; 284; 294; 304; 314; 324; 334; 344; 354; 364; 374; 384; 394; 404; 414; 424; 434; 444; 454; 464; 474; 484; 494; 504; 514; 524; 534; 544; 554; 564; 574; 584; 594; 604; 614; 624; 634; 644; 654; 664; 674; 684; 694; 704; 714; 724; 734; 744; 754; 764; 774; 784; 794; 804; 814; 824; 834; 844; 854; 864; 874; 884 ; 894; 904; 914; 924; 934; 944; 954; 964; 974; 984; 994; 1004; 1014; 1024; 1034; 1044; 1054; 1064; 1074; 1084; 1094; 1104; 1111; and 1115, or comprises 1, 2, 3, 4, 5, 1-2, 1-3, 1-4, 1-5, 1-10, 1-15, 1-20, 1-25, or 1-50 amino acid changes relative to the amino acid sequence selected from the group consisting of SEQ ID NOs: 29; 40; 51; 62; 73; 84; 95; 106; 117; 128; 139; 150; 161; 172; 183; 194; 204; 214; 224; 234; 244; 254; 264; 274; 284; 294; 304; 314; 324; 334; 344; 354; 364; 374; 384; 394; 404; 414; 424; 434; 444; 454; 464; 474; 484; 494; 504; 514; 524; 534; 544; 554; 564; 574; 584; 594; 604; 614; 624; 634; 644; 654; 664; 674; 684; 694; 704; 714; 724; 734; 744; 754; 764; 774; 784; 794; 804; 814; 824; 834; 844; 854; 864; 874; 884 ; 894; 904; 914; 924; 934; 944; 954; 964; 974; 984; 994; 1004; 1014; 1024; 1034; 1044; 1054; 1064; 1074; 1084; 1094; 1104; 1111; and 1115, wherein the antibodies specifically bind to human FGFR1c, FGFR2c, FGFR3c, and/or FGFR4 and retain one or more (e.g., 1, 2, 3, 4, 5, or 6) of the following properties:

[0184] (a) binds to human FGFR1c, FGFR2c, FGFR3c, and/or FGFR4, e.g., with a K_{D} of 10⁻⁷ or less, 10⁻⁸ or less, or 10⁻⁹ or less for FGFR1c; 10⁻⁷ or less, 10⁻⁸ or less, or 10⁻⁹ or less for FGFR2c; 10⁻⁷ or less, 10⁻⁸ or less, or 10⁻⁹ or less for FGFR3c; and/or 10⁻⁷ or less, 10⁻⁸ or less, or 10⁻⁹ or less for FGFR4 when in IgG2 format (e.g., wild-type IgG2 constant region or a variant such as M7 (SEQ ID NO: 1173), e.g., as measured by bio-layer interferometry (e.g., the ForteBio assay described in Example 9);

[0185] (b) binds to human FGFR1c, FGFR2c, FGFR3c, and/or FGFR4, e.g., with an EC50 of, for example, 10 nM or less, 1 nM or less, or 0.05 nM or less for FGFR1c; 10 nM or less, 1 nM or less, or 0.05 nM or less for FGFR2c; 10 nM or less, 1 nM or less, or 0.5 nM or less for FGFR3c; and/or 50 nM or less, 25 nM or less, or 10 nM or less for FGFR4 when in IgG2 format (e.g., wild-type IgG2 constant region or a variant such as M7 (SEQ ID NO: 1173), e.g., as measured by ELISA (see, e.g., Examples 3 and 9);

[0186] (c) does not bind to human FGFR1b, FGFR2b, and/or FGFR3b, as measured by ELISA or bio-layer interferometry;

[0187] (d) inhibits the binding of FGF1 to FGFR1c, FGFR2c, FGFR3c, and/or FGFR4, e.g., with an EC50 of 200 nM or less, 150 nM or less, 50 nM or less, 25 nM or less, or 10 nM or less, e.g., as measured by ELISA (see, e.g., Example 9);

[0188] (e) inhibits FGF2-mediated phosphorylation of ERK, e.g., with an IC₅₀ of 50 or less, 25 nM or less, or 10 nM or less, as measured by SureFire Alpha assay (see, e.g., Example 7); and

[0189] (f) inhibits FGF2-mediated cell viability, e.g., with an IC₅₀ of 100 nM or less, 75 nM or less, 50 nM or less, 25 nM or less, or 10 nM or less, as assessed with CellTiterGlo (see, e.g., Example 8).

[0190] In some embodiments, provided are anti-FGFR antibodies comprising heavy and light chain variable regions, wherein the light chain variable region comprises an amino acid sequence which is at least 80%, 85%, 90%, 95%, 96%, 97%, 98%, or 99% identical to an amino acid sequence selected from the group consisting of SEQ ID NOs: 30; 41; 52; 63; 74; 85; 96; 107; 118; 129; 140; 151; 162; 173; 184; 195; 205; 215; 225; 235; 245; 255; 265; 275; 285; 295; 305; 315; 325; 335; 345; 355; 365; 375; 385; 395; 405; 415; 425; 435; 445; 455; 465; 475; 485; 495; 505; 515; 525; 535; 545; 555; 565; 575; 585; 595; 605; 615; 625; 635; 645; 655; 665; 675; 685; 695; 705; 715; 725; 735; 745; 755; 765; 775; 785; 795; 805; 815; 825; 835; 845; 855; 865; 875; 885; 895; 905; 915; 925; 935; 945; 955; 965; 975; 985; 995; 1005; 1015; 1025; 1035; 1045; 1055; 1065; 1075; 1085; 1095; 1105; 1119; 1123; 1127; 1131; 1135; 1139; 1143; 1147; 1151; 1155; 1159; 1163; and 1167, or comprises 1, 2, 3, 4, 5, 1-2, 1-3, 1-4, 1-5, 1-10, 1-15, 1-20, 1-25, or 1-50 amino acid changes relative to the amino acid sequence selected from the group consisting of SEQ ID NOs: 30; 41; 52; 63; 74; 85; 96; 107; 118; 129; 140; 151; 162; 173; 184; 195; 205; 215; 225; 235; 245; 255; 265; 275; 285; 295; 305; 315; 325; 335; 345; 355; 365; 375; 385; 395; 405; 415; 425; 435; 445; 455; 465; 475; 485; 495; 505; 515; 525; 535; 545; 555; 565; 575; 585; 595; 605; 615; 625; 635; 645; 655; 665; 675; 685; 695; 705; 715; 725; 735; 745; 755; 765; 775; 785; 795; 805; 815; 825; 835; 845; 855; 865; 875; 885; 895; 905; 915; 925; 935; 945; 955; 965; 975; 985; 995; 1005; 1015; 1025; 1035; 1045; 1055; 1065; 1075; 1085; 1095; 1105; 1119; 1123; 1127; 1131; 1135; 1139; 1143; 1147; 1151; 1155; 1159; 1163; and 1167, wherein the antibodies specifically bind to FGFR1c, FGFR2c, FGFR3c, and/or FGFR4 and retain one or more (e.g., 1, 2, 3, 4, 5, or 6) of the following properties:

[0191] (a) binds to human FGFR1c, FGFR2c, FGFR3c, and/or FGFR4, e.g., with a K_{D} of 10⁻⁷ or less, 10⁻⁸ or less, or 10⁻⁹ or less for FGFR1c; 10⁻⁷ or less, 10⁻⁸ or less, or 10⁻⁹ or less for FGFR2c; 10⁻⁷ or less, 10⁻⁸ or less, or 10⁻⁹ or less for FGFR3c; and/or 10⁻⁷ or less, 10⁻⁸ or less, or 10 or less for FGFR4 when in IgG2 format (e.g., wild-type IgG2 constant region or a variant such as M7 (SEQ ID NO: 1173), e.g., as measured by bio-layer interferometry (e.g., the ForteBio assay described in Example 9);

[0192] (b) binds to human FGFR1c, FGFR2c, FGFR3c, and/or FGFR4, e.g., with an EC50 of, for example, 10 nM or less, 1 nM or less, or 0.05 nM or less for FGFR1c; 10 nM or less, 1 nM or less, or 0.05 nM or less for FGFR2c; 10 nM or less, 1 nM or less, or 0.5 nM or less for FGFR3c; and/or 50 nM or less, 25 nM or less, or 10 nM or less for FGFR4 when in IgG2 format (e.g., wild-type IgG2 constant region or a variant such as M7 (SEQ ID NO: 1173), e.g., as measured by ELISA (see, e.g., Examples 3 and 9);

[0193] (c) does not bind to human FGFR1b, FGFR2b, and/or FGFR3b, as measured by ELISA or bio-layer interferometry;

[0194] (d) inhibits the binding of FGF1 to FGFR1c, FGFR2c, FGFR3c, and/or FGFR4, e.g., with an EC50 of 200 nM or less, 150 nM or less, 50 nM or less, 25 nM or less, or 10 nM or less, e.g., as measured by ELISA (see, e.g., Example 9);

[0195] (e) inhibits FGF2-mediated phosphorylation of ERK, e.g., with an IC50 of 50 or less, 25 nM or less, or 10 nM or less, as measured by SureFire Alpha assay (see, e.g., Example 7); and

[0196] (f) inhibits FGF2-mediated cell viability, e.g., with an IC₅₀ of 100 nM or less, 75 nM or less, 50 nM or less, 25 nM or less, or 10 nM or less, as assessed with CellTiterGlo (see, e.g., Example 8).

[0197] In some embodiments, provided are anti-FGFR antibodies comprising heavy and light chain variable regions, wherein the antibodies comprise heavy and light chain variable region sequences which are at least 80%, 85%, 90%, 95%, 96%, 97%, 98%, or 99% identical to the amino acid sequences selected from the group consisting of SEQ ID NOs: 29 and 30; 40 and 41; 51 and 52; 62 and 63; 73 and 74; 84 and 85; 95 and 96; 106 and 107; 117 and 118; 128 and 129; 139 and 140; 150 and 151; 161 and 162; 172 and 173; 183 and 184; 194 and 195; 204 and 205; 214 and 215; 224 and 225; 234 and 235; 244 and 245; 254 and 255; 264 and 265; 274 and 275; 284 and 285; 294 and 295; 304 and 305; 314 and 315; 324 and 325; 334 and 335; 344 and 345; 354 and 355; 364 and 365; 374 and 375; 384 and 385; 394 and 395; 404 and 405; 414 and 415; 424 and 425; 434 and 435; 444 and 445; 454 and 455; 464 and 465; 474 and 475; 484 and 485; 494 and 495; 504 and 505; 514 and 515; 524 and 525; 534 and 535; 544 and 545; 554 and 555; 564 and 565; 574 and 575; 584 and 585; 594 and 595; 604 and 605; 614 and 615; 624 and 625; 634 and 635; 644 and 645; 654 and 655; 664 and 665; 674 and 675; 684 and 685; 694 and 695; 704 and 705; 714 and 715; 724 and 725; 734 and 735; 744 and 745; 754 and 755; 764 and 765; 774 and 775; 784 and 785; 794 and 795; 804 and 805; 814 and 815; 824 and 825; 834 and 835; 844 and 845; 854 and 855; 864 and 865; 874 and 875; 884 and 885; 894 and 895; 904 and 905; 914 and 915; 924 and 925; 934 and 935; 944 and 945; 954 and 955; 964 and 965; 974 and 975; 984 and 985; 994 and 995; 1004 and 1005; 1014 and 1015; 1024 and 1025; 1034 and 1035; 1044 and 1045; 1054 and 1055; 1064 and 1065; 1074 and 1075; 1084 and 1085; 1094 and 1095; and 1104 and 1105,wherein the antibodies specifically bind to human FGFR1c, FGFR2c, FGFR3c, and/or FGFR4 and retain one or more (e.g., 1, 2, 3, 4, 5, or 6) of the following properties:

[0198] (a) binds to human FGFR1c, FGFR2c, FGFR3c, and/or FGFR4, e.g., with a K_{D} of 10⁻⁷ or less, 10⁻⁸ or less, or 10⁻⁹ or less for FGFR1c; 10⁻⁷ or less, 10⁻⁸ or less, or 10⁻⁹ or less for FGFR2c; 10⁻⁷ or less, 10⁻⁸ or less, or 10⁻⁹ or less for FGFR3c; and/or 10⁻⁷ or less, 10⁻⁸ or less, or 10 or less for FGFR4 when in IgG2 format (e.g., wild-type IgG2 constant region or a variant such as M7 (SEQ ID NO: 1173)), e.g., as measured by bio-layer interferometry (e.g., the ForteBio assay described in Example 9);

[0199] (b) binds to human FGFR1c, FGFR2c, FGFR3c, and/or FGFR4, e.g., with an EC50 of, for example, 10 nM or less, 1 nM or less, or 0.05 nM or less for FGFR1c; 10 nM or less, 1 nM or less, or 0.05 nM or less for FGFR2c; 10 nM or less, 1 nM or less, or 0.5 nM or less for FGFR3c; and/or 50 nM or less, 25 nM or less, or 10 nM or less for FGFR4 when in IgG2 format (e.g., wild-type IgG2 constant region or a variant such as M7 (SEQ ID NO: 1173), e.g., as measured by ELISA (see, e.g., Examples 3 and 9);

[0200] (c) does not bind to human FGFR1b, FGFR2b, and/or FGFR3b, as measured by ELISA or bio-layer interferometry;

[0201] (d) inhibits the binding of FGF1 to FGFR1c, FGFR2c, FGFR3c, and/or FGFR4, e.g., with an EC50 of 200 nM or less, 150 nM or less, 50 nM or less, 25 nM or less, or 10 nM or less, e.g., as measured by ELISA (see, e.g., Example 9);

[0202] (e) inhibits FGF2-mediated phosphorylation of ERK, e.g., with an IC₅₀ of 50 or less, 25 nM or less, or 10 nM or less, as measured by SureFire Alpha assay (see, e.g., Example 7); and

[0203] (f) inhibits FGF2-mediated cell viability, e.g., with an IC₅₀ of 100 nM or less, 75 nM or less, 50 nM or less, 25 nM or less, or 10 nM or less, as assessed with CellTiterGlo (see, e.g., Example 8).

[0204] In some embodiments, provided are anti-FGFR antibodies comprising heavy and light chains, wherein the heavy chain comprises an amino acid sequence which is at least 80%, 85%, 90%, 95%, 96%, 97%, 98%, or 99% identical to an amino acid sequence selected from the group consisting of SEQ ID NOs: 32; 43; 54; 65; 76; 87; 98; 109; 120; 131; 142; 153; 164; 175; 186; 196; 206; 216; 226; 236; 246; 256; 266; 276; 286; 296; 306; 316; 326; 336; 346; 356; 366; 376; 386; 396; 406; 416; 426; 436; 446; 456; 466; 476; 486; 496; 506 516; 526; 536; 546; 556; 566; 576; 586; 596; 606; 616; 626; 636; 646; 656; 666; 676; 686; 696; 706; 716; 726; 736; 746; 756; 766; 776; 786; 796; 806; 816; 826; 836; 846; 856; 866; 876; 886; 896; 906; 916; 926; 936; 946; 956; 966; 976; 986; 996; 1006; 1016; 1026; 1036; 1046; 1056; 1066; 1076; 1086; 1096; and 1106, or comprises 1, 2, 3, 4, 5, 1-2, 1-3, 1-4, 1-5, 1-10, 1-15, 1-20, 1-25, or 1-50 amino acid changes relative to the amino acid sequence selected from the group consisting of SEQ ID NOs: 32; 43; 54; 65; 76; 87; 98; 109; 120; 131; 142; 153; 164; 175; 186; 196; 206; 216; 226; 236; 246; 256; 266; 276; 286; 296; 306; 316; 326; 336; 346; 356; 366; 376; 386; 396; 406; 416; 426; 436; 446; 456; 466; 476; 486; 496; 506 516; 526; 536; 546; 556; 566; 576; 586; 596; 606; 616; 626; 636; 646; 656; 666; 676; 686; 696; 706; 716; 726; 736; 746; 756; 766; 776; 786; 796; 806; 816; 826; 836; 846; 856; 866; 876; 886; 896; 906; 916; 926; 936; 946; 956; 966; 976; 986; 996; 1006; 1016; 1026; 1036; 1046; 1056; 1066; 1076; 1086; 1096; and 1106, wherein the antibodies specifically bind to human FGFR1c, FGFR2c, FGFR3c, and/or FGFR4 and retain one or more (e.g., 1, 2, 3, 4, 5, or 6) of the following properties:

[0205] (a) binds to human FGFR1c, FGFR2c, FGFR3c, and/or FGFR4, e.g., with a K_{D} of 10⁻⁷ or less, 10⁻⁸ or less, or 10⁻⁹ or less for FGFR1c; 10⁻⁷ or less, 10⁻⁸ or less, or 10⁻⁹ or less for FGFR2c; 10⁻⁷ or less, 10⁻⁸ or less, or 10⁻⁹ or less for FGFR3c; and/or 10⁻⁷ or less, 10⁻⁸ or less, or 10 or less for FGFR4 when in IgG2 format (e.g., wild-type IgG2 constant region or a variant such as M7 (SEQ ID NO: 1173)), e.g., as measured by bio-layer interferometry (e.g., the ForteBio assay described in Example 9);

[0206] (b) binds to human FGFR1c, FGFR2c, FGFR3c, and/or FGFR4, e.g., with an EC50 of, for example, 10 nM or less, 1 nM or less, or 0.05 nM or less for FGFR1c; 10 nM or less, 1 nM or less, or 0.05 nM or less for FGFR2c; 10 nM or less, 1 nM or less, or 0.5 nM or less for FGFR3c; and/or 50 nM or less, 25 nM or less, or 10 nM or less for FGFR4 when in IgG2 format (e.g., wild-type IgG2 constant region or a variant such as M7 (SEQ ID NO: 1173)), e.g., as measured by ELISA (see, e.g., Examples 3 and 9);

[0207] (c) does not bind to human FGFR1b, FGFR2b, and/or FGFR3b , as measured by ELISA or bio-layer interferometry;

[0208] (d) inhibits the binding of FGF1 to FGFR1c, FGFR2c, FGFR3c, and/or FGFR4, e.g., with an EC50 of 200 nM or less, 150 nM or less, 50 nM or less, 25 nM or less, or 10 nM or less, e.g., as measured by ELISA (see, e.g., Example 9);

[0209] (e) inhibits FGF2-mediated phosphorylation of ERK, e.g., with an IC₅₀ of 50 or less, 25 nM or less, or 10 nM or less, as measured by SureFire Alpha assay (see, e.g., Example 7); and

[0210] (f) inhibits FGF2-mediated cell viability, e.g., with an IC₅₀ of 100 nM or less, 75 nM or less, 50 nM or less, 25 nM or less, or 10 nM or less, as assessed with CellTiterGlo (see, e.g., Example 8).

[0211] In some embodiments, provided are anti-FGFR antibodies comprising heavy and light chains, wherein the light chain comprises an amino acid sequence which is at least 80%, 85%, 90%, 95%, 96%, 97%, 98%, or 99% identical to an amino acid sequence selected from the group consisting of SEQ ID NOs: 33; 44; 55; 66; 77; 88; 99; 110; 121; 132; 143; 154; 165; 176; 186; 196; 206; 216; 226; 236; 246; 256; 266; 277; 287; 297; 307; 317; 327; 337; 347; 357; 367; 377; 387; 397; 407; 417; 427; 437; 447; 457; 467; 477; 487; 497; 507; 517; 527; 537; 547; 557; 567; 577; 587; 597; 607; 617; 627; 637; 647; 657; 667; 677; 687; 697; 707; 717; 727; 737; 747 757; 767; 777; 787; 797; 807; 817; 827; 837; 847; 857; 867; 877; 887; 897; 907; 917; 927; 937; 947; 957; 967; 977; 987; 997; 1007; 1017; 1027; 1037; 1047; 1057; 1067; 1077; 1087; 1097; and 1107, or comprises 1, 2, 3, 4, 5, 1-2, 1-3, 1-4, 1-5, 1-10, 1-15, 1-20, 1-25, or 1-50 amino acid changes relative to the amino acid sequence selected from the group consisting of SEQ ID NOs: 33; 44; 55; 66; 77; 88; 99; 110; 121; 132; 143; 154; 165; 176; 186; 196; 206; 216; 226; 236; 246; 256; 266; 277; 287; 297; 307; 317; 327; 337; 347; 357; 367; 377; 387; 397; 407; 417; 427; 437; 447; 457; 467; 477; 487; 497; 507; 517; 527; 537; 547; 557; 567; 577; 587; 597; 607; 617; 627; 637; 647; 657; 667; 677; 687; 697; 707; 717; 727; 737; 747 757; 767; 777; 787; 797; 807; 817; 827; 837; 847; 857; 867; 877; 887; 897; 907; 917; 927; 937; 947; 957; 967; 977; 987; 997; 1007; 1017; 1027; 1037; 1047; 1057; 1067; 1077; 1087; 1097; and 1107, wherein the antibodies specifically bind to FGFR1c, FGFR2c, FGFR3c, and/or FGFR4 and retain one or more (e.g., 1, 2, 3, 4, 5, or 6) of the following properties:

[0212] (a) binds to human FGFR1c, FGFR2c, FGFR3c, and/or FGFR4, e.g., with a K_{D} of 10⁻⁷ or less, 10⁻⁸ or less, or 10⁻⁹ or less for FGFR1c; 10⁻⁷ or less, 10⁻⁸ or less, or 10⁻⁹ or less for FGFR2c; 10⁻⁷ or less, 10⁻⁸ or less, or 10⁻⁹ or less for FGFR3c; and/or 10⁻⁷ or less, 10⁻⁸ or less, or 10 or less for FGFR4 when in IgG2 format (e.g., wild-type IgG2 constant region or a variant such as M7 (SEQ ID NO: 1173)), e.g., as measured by bio-layer interferometry (e.g., the ForteBio assay described in Example 9);

[0213] (b) binds to human FGFR1c, FGFR2c, FGFR3c, and/or FGFR4, e.g., with an EC50 of, for example, 10 nM or less, 1 nM or less, or 0.05 nM or less for FGFR1c; 10 nM or less, 1 nM or less, or 0.05 nM or less for FGFR2c; 10 nM or less, 1 nM or less, or 0.5 nM or less for FGFR3c; and/or 50 nM or less, 25 nM or less, or 10 nM or less for FGFR4 when in IgG2 format (e.g., wild-type IgG2 constant region or a variant such as M7 (SEQ ID NO: 1173)), e.g., as measured by ELISA (see, e.g., Examples 3 and 9);

[0214] (c) does not bind to human FGFR1b, FGFR2b, and/or FGFR3b, as measured by ELISA or bio-layer interferometry;

[0215] (d) inhibits the binding of FGF1 to FGFR1c, FGFR2c, FGFR3c, and/or FGFR4, e.g., with an EC50 of 200 nM or less, 150 nM or less, 50 nM or less, 25 nM or less, or 10 nM or less, e.g., as measured by ELISA (see, e.g., Example 9);

[0216] (e) inhibits FGF2-mediated phosphorylation of ERK, e.g., with an IC₅₀ of 50 or less, 25 nM or less, or 10 nM or less, as measured by SureFire Alpha assay (see, e.g., Example 7); and

[0217] (f) inhibits FGF2-mediated cell viability, e.g., with an IC₅₀ of 100 nM or less, 75 nM or less, 50 nM or less, 25 nM or less, or 10 nM or less, as assessed with CellTiterGlo (see, e.g., Example 8).

[0218] In some embodiments, provided are anti-FGFR antibodies comprising heavy and light chains, wherein the antibodies comprise heavy and light chain sequences which are at least 80%, 85%, 90%, 95%, 96%, 97%, 98%, or 99% identical to the amino acid sequences selected from the group consisting of SEQ ID NOs: 32 and 33; 43 and 44; 54 and 55; 65 and 66; 76 and 77; 87 and 88; 98 and 99; 109 and 110; 120 and 121; 131 and 132; 142 and 143; 153 and 154; 164 and 165; 175 and 176; 186 and 187; 196 and 197; 206 and 207; 216 and 217; 226 and 227; 236 and 237; 246 and 247; 256 and 257; 266 and 267; 276 and 277; 286 and 287; 296 and 297; 306 and 307; 316 and 317; 326 and 327; 336 and 337; 346 and 347; 356 and 357; 366 and 367; 376 and 377; 386 and 387; 396 and 397; 406 and 407; 416 and 417; 426 and 427; 436 and 437; 446 and 447; 456 and 457; 466 and 467; 476 and 477; 486 and 487; 496 and 497; 506 and 507; 516 and 517; 526 and 527; 536 and 537; 546 and 547; 556 and 557; 566 and 567; 576 and 577; 586 and 587; 596 and 597; 606 and 607; 616 and 617; 626 and 627; 636 and 637; 646 and 647; 656 and 657; 666 and 667; 676 and 677; 686 and 687; 696 and 697; 706 and 707; 716 and 717; 726 and 727; 736 and 737; 746 and 747; 756 and 757; 766 and 767; 776 and 777; 786 and 787; 796 and 797; 806 and 807; 816 and 817; 826 and 827; 836 and 837; 846 and 847; 856 and 857; 866 and 867; 876 and 877; 886 and 887; 896 and 897; 906 and 907; 916 and 917; 926 and 927; 936 and 937; 946 and 947; 956 and 957; 966 and 967; 976 and 977; 986 and 987; 996 and 997; 1006 and 1007; 1016 and 1017; 1026 and 1027; 1036 and 1037; 1046 and 1047; 1056 and 1057; 1066 and 1067; 1076 and 1077; 1086 and 1087; 1096 and 1097; and 1106 and 1107, wherein the antibodies specifically bind to human FGFR1c, FGFR2c, FGFR3c, and/or FGFR4 and retain one or more (e.g., 1, 2, 3, 4, 5, or 6) of the following properties:

[0219] (a) binds to human FGFR1c, FGFR2c, FGFR3c, and/or FGFR4, e.g., with a K_{D} of 10⁻⁷ or less, 10⁻⁸ or less, or 10⁻⁹ or less for FGFR1c; 10⁻⁷ or less, 10⁻⁸ or less, or 10⁻⁹ or less for FGFR2c; 10⁻⁷ or less, 10⁻⁸ or less, or 10⁻⁹ or less for FGFR3c; and/or 10⁻⁷ or less, 10⁻⁸ or less, or 10⁻⁹ or less for FGFR4 when in IgG2 format (e.g., wild-type IgG2 constant region or a variant such as M7 (SEQ ID NO: 1173)), e.g., as measured by bio-layer interferometry (e.g., the ForteBio assay described in Example 9);

[0220] (b) binds to human FGFR1c, FGFR2c, FGFR3c, and/or FGFR4, e.g., with an EC50 of, for example, 10 nM or less, 1 nM or less, or 0.05 nM or less for FGFR1c; 10 nM or less, 1 nM or less, or 0.05 nM or less for FGFR2c; 10 nM or less, 1 nM or less, or 0.5 nM or less for FGFR3c; and/or 50 nM or less, 25 nM or less, or 10 nM or less for FGFR4 when in IgG2 format (e.g., wild-type IgG2 constant region or a variant such as M7 (SEQ ID NO: 1173)), e.g., as measured by ELISA (see, e.g., Examples 3 and 9);

[0221] (c) does not bind to human FGFR1b, FGFR2b, and/or FGFR3b , as measured by ELISA or bio-layer interferometry;

[0222] (d) inhibits the binding of FGF1 to FGFR1c, FGFR2c, FGFR3c, and/or FGFR4, e.g., with an EC50 of 200 nM or less, 150 nM or less, 50 nM or less, 25 nM or less, or 10 nM or less, e.g., as measured by ELISA (see, e.g., Example 9);

[0223] (e) inhibits FGF2-mediated phosphorylation of ERK, e.g., with an IC₅₀ of 50 or less, 25 nM or less, or 10 nM or less, as measured by SureFire Alpha assay (see, e.g., Example 7); and

[0224] (f) inhibits FGF2-mediated cell viability, e.g., with an IC₅₀ of 100 nM or less, 75 nM or less, 50 nM or less, 25 nM or less, or 10 nM or less, as assessed with CellTiterGlo (see, e.g., Example 8).

[0225] In some embodiments, some or all of the amino acid changes made to the CDR(s) or variable regions of the altered anti-FGFR antibodies described above are conservative modifications, wherein the antibodies retain the desired functional properties of the anti-FGFR antibodies described herein.

[0226] Certain positions within the VH and/or VL CDR sequences of antibodies are substitutable (variation-tolerant) positions, i.e., a particular position of one or more VH and/or VL CDR sequences in an antibody that may be substituted by different amino acids without significantly decreasing the binding activity of the antibody. Once such a position is identified, the amino acid at that position may be substituted for a different amino acid without significantly decreasing the binding activity of the antibody. In order to identify a substitutable position of an antibody, the amino acid sequence of that antibody is compared to the sequences of other antibodies belonging to the same group as that antibody (e.g., affinity matured and parental antibodies, a group of distinct antibodies generated from immunizing an animal with a particular antigen). If the identity of that amino acid varies between the different related antibodies of a group at any particular position, that position is a substitutable position of the antibody. In other words, a substitutable position is a position in which the identity of the amino acid varies between the related antibodies.

[0227] In one embodiment, the above method may be employed to provide a consensus antibody sequence. In such a consensus sequence, a non-substitutable position is indicated by the amino acid present at that position, and a substitutable position is indicated as an “X,” wherein X can be any amino acid, any amino acid present at that position in a related antibody, or a conservatively substituted amino acid present at that position in a related antibody. For example, if unrelated amino acids (e.g., ala, gly, cys, glu and thr) are present at a certain position of a group of related antibodies, then any amino acid could be substituted at that position without significantly reducing binding activity of the antibody. Similarly, if a subset of non-polar amino acids (e.g., val, ile, ala and met) are present at a certain position of a set of related antibodies, then other non-polar amino acids (e.g., leu) could be substituted at that position without significantly reducing binding activity of the antibody. Any antibody having a sequence that is encompassed by the consensus should bind to the same antigen as any of the related antibodies, and this can be tested using binding assays known in the art, such as those described herein. The antibodies can also be tested, using methods disclosed herein, for their ability to bind to human FGFR1c, FGFR2c, FGFR3c, and/or FGFR4; lack of binding to human FGFR1b, FGFR2b, and/or FGFR3b; inhibit the binding of FGF1 to human FGFR1c, FGFR2c, FGFR3c, and/or FGFR4; inhibit FGF2-mediated phosphorylation of ERK; and/or inhibit FGF2-mediated cell viability, as described above.

[0228] Detailed methods for identifying substitutable positions are described in US2015/0038370, the contents of which are herein incorporated by reference.

[0229] In general, the framework regions of antibodies are usually substantially identical, and more often, identical to the framework regions of the human germline sequences from which they were derived. Many of the amino acids in the framework region make little or no direct contribution to the specificity or affinity of an antibody. Thus, many individual conservative substitutions of framework residues can be tolerated without appreciable change of the specificity or affinity of the resulting immunoglobulin. Thus, in one embodiment, the variable framework region of the antibody shares at least 85% sequence identity to a human germline variable framework region sequence or consensus of such sequences. In another embodiment, the variable framework region of the antibody shares at least 90%, 95%, 96%, 97%, 98% or 99% sequence identity to a human germline variable framework region sequence or consensus of such sequences. In a preferred embodiment made within one or more of the framework regions, FR1, FR2, FR3 and FR4, of the heavy and/or the light chain variable regions of an antibody, do not eliminate the binding of the antibody to its antigen (e.g., FGFR1c, FGFR2c, FGFR3c, and/or FGFR4).

[0230] In another aspect, the structural features of an anti-FGFR antibody described herein, e.g. Ab1-Ab107, are used to create structurally-related anti-FGFR antibodies that retain at least one functional property of the antibodies described herein, such as binding to human FGFR1c, FGFR2c, FGFR3c, and/or FGFR4. For example, one or more CDR regions ofany of Ab1-Ab107, or altered sequences thereof, can be combined recombinantly with known framework regions and/or other CDRs to create additional, recombinantly-engineered, anti-FGFR antibodies.

[0231] Antibodies having sequences with homology to the variable region or CDR sequences of any of Ab1-Ab107 can be generated by mutagenesis (e.g., site-directed or PCR-mediated mutagenesis) of nucleic acid molecules encoding the respective variable regions, followed by testing to determine whether the altered antibody retains the desired function.

[0232] Also provided herein are anti-FGFR antibodies wherein the V_{H} CDR1, 2 and 3 sequences and V_{L} CDR1, 2 and 3 sequences, or VH and VL sequences, are “mixed and matched” (i.e., CDRs from different antibodies, e.g., from any of Ab1-Ab107), although each antibody must contain a V_{H} CDR1, 2 and 3 and a V_{L} CDR1, 2 and 3 to create other anti-FGFR antibodies. Assays to determine whether the resultant antibodies retain the desired features (including binding to FGFR1c, FGFR2c, FGFR3c, and/or FGFR4) can be determined using the methods described in the Examples.

Antibodies with Modified Fc Regions

[0233] In some embodiments, provided herein are anti-FGFR antibodies comprising a modified heavy chain Fc region. In one embodiment, the anti-FGFR antibody comprises an IgG2 or variant IgG2 Fc region.

[0234] In one embodiment, an anti-FGFR antibody comprises an Fc region comprising the substitutions A330S/P331S, which reduces effector function.

[0235] In a particular embodiment, the anti-FGFR antibody comprises a hybrid IgG2/IgG4 Fc region, for example, an IgG2 Fc region with four amino acid residue changes derived from IgG4 (i.e., H268Q, V309L, A330S, and P331S), also referred to as IgG2m4 (An et al. mAbs 2009;1:572-579).

[0236] Additional modified Fc regions suitable for use with the anti-FGFR antibodies described herein include, but are not limited to, the Fc regions comprising amino acid sequences set forth in SEQ ID NOs: 1172-1175 (optionally with the first three amino acids “AST” removed).

[0237] Accordingly, provided herein are anti-FGFR antibodies comprising the VH and VL sequences of Ab1-Ab107 and a Fc region with an IgG2 constant region or a variant IgG2 constant region (e.g., a hybrid IgG2/IgG4 Fc region). In some embodiments, provided herein are anti-FGFR antibodies comprising the VH and VL sequences of Ab1-Ab107 and an Fc region with an amino acid sequence selected from the group consisting of SEQ ID NOs: 1172-1175 (optionally with the first three amino acids “AST” removed).

[0238] Also contemplated are anti-FGFR antibodies comprising an Fc region with reduced or no effector function (e.g., the Fc of IgG2 or IgG4). Generally, the variable regions described herein may be linked to an Fc comprising one or more modification, typically to alter one or more functional properties of the antibody, such as serum half-life, complement fixation, Fc receptor binding, and/or antigen-dependent cellular cytotoxicity. For example, modifications may be made in the Fc region to generate an Fc variant that (a) has decreased antibody-dependent cell-mediated cytotoxicity (ADCC), (b) decreased complement mediated cytotoxicity (CDC), (c) has decreased affinity for C1q and/or (d) has increased or decreased affinity for a Fc receptor relative to the parent Fc. Such Fc variants may comprise one or more amino cid modifications. For example, a variant Fc region may include two, three, four, five, etc. substitutions therein, such as the substitutions described below. The numbering of residues in the Fc region described below is based on the EU index of Kabat.

[0239] In some embodiments, sites involved in interaction with complement, such as the C1q binding site, may be removed from the Fc region. For example, the EKK sequence of human IgG1 may be deleted. In some embodiments, sites that affect binding to Fc receptors may be removed, preferably sites other than salvage receptor binding sites. In other embodiments, an Fc region may be modified to remove an ADCC site. ADCC sites are known in the art; see, for example, Molec. Immunol. 29 (5): 633-9 (1992) with regard to ADCC sites in IgG1. Specific examples of variant Fc domains are disclosed for example, in WO 97/34631 and WO 96/32478.

[0240] In some embodiments, one or more amino acids selected from amino acid residues 234, 235, 236, 237, 297, 318, 320 and 322 can be replaced with a different amino acid residue such that the antibody has an altered affinity for an effector ligand but retains the antigen-binding ability of the parent antibody. The effector ligand to which affinity is altered can be, for example, an Fc receptor or the Cl component of complement. This approach is described in further detail in U.S. Pat. No. 5,624,821 and U.S. Pat. No. 5,648,260, both by Winter et al.

[0241] In further embodiments, one or more amino acids selected from amino acid residues 329, 331 and 322 can be replaced with a different amino acid residue such that the antibody has altered C1q binding and/or reduced or abolished complement dependent cytotoxicity (CDC). This approach is described in further detail in U.S. Patent No. 6,194,551 by Idusogie et al.

[0242] In some embodiments, one or more amino acid residues within amino acid positions 231 and 239 are altered to thereby alter the ability of the antibody to fix complement. This approach is described further in PCT Publication WO 94/29351 by Bodmer et al.

[0243] Other Fc modifications that can be made to Fcs are those for reducing or ablating binding to FcγR and/or complement proteins, thereby reducing or ablating Fc-mediated effector functions such as ADCC, ADCP, and CDC. Exemplary modifications include but are not limited substitutions, insertions, and deletions at positions 234, 235, 236, 237, 267, 269, 325, and 328, wherein numbering is according to the EU index. Exemplary substitutions include but are not limited to 234G, 235G, 236R, 237K, 267R, 269R, 325L, and 328R, wherein numbering is according to the EU index. An Fc variant may comprise 236R/328R. Other modifications for reducing FcyR and complement interactions include substitutions 297A, 234A, 235A, 237A, 318A, 228P, 236E, 268Q, 309L, 330S, 331S, 220S, 226S, 2295, 238S, 233P, and 234V, as well as removal of the glycosylation at position 297 by mutational or enzymatic means or by production in organisms such as bacteria that do not glycosylate proteins. These and other modifications are reviewed in Strohl, 2009, Current Opinion in Biotechnology 20:685-691.

### IV. Nucleic Acid Molecules

[0244] Also provided herein are nucleic acid molecules that encode the antibodies described herein. The nucleic acids may be present in whole cells, in a cell lysate, or in a partially purified or substantially pure form. A nucleic acid described herein can be, for example, DNA or RNA and may or may not contain intronic sequences. In a certain embodiments, the nucleic acid is a cDNA molecule. The nucleic acids described herein can be obtained using standard molecular biology techniques. For antibodies expressed by hybridomas (e.g., hybridomas prepared from transgenic mice carrying human immunoglobulin genes as described further below), cDNAs encoding the light and heavy chains of the antibody made by the hybridoma can be obtained by standard PCR amplification or cDNA cloning techniques. For antibodies obtained from an immunoglobulin gene library (e.g., using phage display techniques), nucleic acid encoding the antibody can be recovered from the library.

[0245] In some embodiments, provided herein are nucleic acid molecules that encode the VH and/or VL sequences, or heavy and/or light chain sequences, of any of Ab1-Ab107, as well as nucleic acid molecules which are at least 80%, at least 85%, at least 90%, at least 95%, or at least 99% identical to nucleic acid molecules encoding the VH and/or VL sequences, or heavy and/or light chain sequences, of any of Ab1-Ab107. Host cells comprising the nucleotide sequences (e.g., nucleic acid molecules) described herein are encompassed herein.

[0246] Once DNA fragments encoding VH and VL segments are obtained, these DNA fragments can be further manipulated by standard recombinant DNA techniques, for example to convert the variable region genes to full-length antibody chain genes, to Fab fragment genes or to a scFv gene. In these manipulations, a VL- or VH-encoding DNA fragment is operatively linked to another DNA fragment encoding another protein, such as an antibody constant region or a flexible linker. The term “operatively linked”, as used in this context, is intended to mean that the two DNA fragments are joined such that the amino acid sequences encoded by the two DNA fragments remain in-frame.

[0247] The isolated DNA encoding the VH region can be converted to a full-length heavy chain gene by operatively linking the VH-encoding DNA to another DNA molecule encoding heavy chain constant regions (hinge, CH1, CH2 and/or CH3). The sequences of human heavy chain constant region genes are known in the art (see e.g., Kabat, E. A., el al. (1991) Sequences of Proteins of Immunological Interest, Fifth Edition, U.S. Department of Health and Human Services, NIH Publication No. 91-3242) and DNA fragments encompassing these regions can be obtained by standard PCR amplification.

[0248] The isolated DNA encoding the VL region can be converted to a full-length light chain gene (as well as a Fab light chain gene) by operatively linking the VL-encoding DNA to another DNA molecule encoding the light chain constant region, CL. The sequences of human light chain constant region genes are known in the art (see e.g., Kabat, E. A., et al. (1991) Sequences of Proteins of Immunological Interest, Fifth Edition, U.S. Department of Health and Human Services, NIH Publication No. 91-3242) and DNA fragments encompassing these regions can be obtained by standard PCR amplification. The light chain constant region can be a kappa or lambda constant region.

[0249] Also provided herein are nucleic acid molecules with conservative substitutions that do not alter the resulting amino acid sequence upon translation of the nucleic acid molecule.

### V. Methods for Producing Antibodies

[0250] The anti-FGFR antibodies provided herein typically are prepared by standard recombinant DNA techniques based on the amino acid sequences of the V_{H} and V_{L} regions disclosed herein. Additionally or alternatively, monoclonal antibodies can be produced using a variety of known techniques, such as the standard somatic cell hybridization technique, viral or oncogenic transformation of B lymphocytes, or yeast or phage display techniques using libraries of human antibody genes. In particular embodiments, the antibodies are fully human monoclonal antibodies.

[0251] In one embodiment, a hybridoma method is used to produce an antibody that binds FGFRs (e.g., human FGFRs such as human FGFR1c, FGFR2c, FGFR3c, and/or FGFR4). In this method, a mouse or other appropriate host animal can be immunized with a suitable antigen in order to elicit lymphocytes that produce or are capable of producing antibodies that will specifically bind to the antigen used for immunization. Alternatively, lymphocytes may be immunized in vitro. Lymphocytes can then be fused with myeloma cells using a suitable fusing agent, such as polyethylene glycol, to form a hybridoma cell. Culture medium in which hybridoma cells are growing is assayed for production of monoclonal antibodies directed against the antigen. After hybridoma cells are identified that produce antibodies of the desired specificity, affinity, and/or activity, the clones may be subcloned by limiting dilution procedures and grown by standard methods. Suitable culture media for this purpose include, for example, D-MEM or RPMI-1640 medium. In addition, the hybridoma cells may be grown in vivo as ascites tumors in an animal. The monoclonal antibodies secreted by the subclones can be separated from the culture medium, ascites fluid, or serum by conventional immunoglobulin purification procedures such as, for example, protein A-Sepharose, hydroxylapatite chromatography, gel electrophoresis, dialysis, or affinity chromatography.

[0252] Antibodies can also be produced in a host cell transfectoma using, for example, a combination of recombinant DNA techniques and gene transfection methods known in the art (Morrison, S. (1985) Science 229:1202). For example, to express antibodies, or antibody fragments thereof, DNAs encoding partial or full-length light and heavy chains, can be obtained by standard molecular biology techniques (e.g., PCR amplification or cDNA cloning using a hybridoma that expresses the antibody of interest) and the DNAs can be inserted into expression vectors such that the genes are operatively linked to transcriptional and translational control sequences. In this context, the term “operatively linked” means that an antibody gene is ligated into a vector such that transcriptional and translational control sequences within the vector serve their intended function of regulating the transcription and translation of the antibody gene. The expression vector and expression control sequences are chosen to be compatible with the expression host cell used. The antibody light chain gene and the antibody heavy chain gene can be inserted into separate vector or both genes are inserted into the same expression vector. The antibody genes are inserted into the expression vector(s) by standard methods (e.g., ligation of complementary restriction sites on the antibody gene fragment and vector, or blunt end ligation if no restriction sites are present). The light and heavy chain variable regions of the antibodies described herein can be used to create full-length antibody genes of any antibody isotype by inserting them into expression vectors already encoding heavy chain constant and light chain constant regions of the desired isotype such that the V_{H} segment is operatively linked to the C_{H} segment(s) within the vector and the V_{L} segment is operatively linked to the C_{L} segment within the vector.

[0253] For expression of light and heavy chains, the expression vector(s) encoding the heavy and light chains is transfected into a host cell by standard techniques. Although it is possible to express the antibodies described herein in either prokaryotic or eukaryotic host cells, expression of antibodies in eukaryotic cells, and most preferably mammalian host cells, is the most preferred because such eukaryotic cells, and in particular mammalian cells, are more likely than prokaryotic cells to assemble and secrete a properly folded and immunologically active antibody. Preferred mammalian host cells for expressing the recombinant antibodies described herein include Chinese Hamster Ovary (CHO cells) (including dhfr- CHO cells, described in Urlaub and Chasin, (1980) Proc. Natl. Acad. Sci. USA 77:4216-4220, used with a DHFR selectable marker, e.g., as described in R. J. Kaufman and P. A. Sharp (1982) Mol. Biol. 159:601-621), NSO myeloma cells, COS cells and SP2 cells. When recombinant expression vectors encoding antibody genes are introduced into mammalian host cells, the antibodies are produced by culturing the host cells for a period of time sufficient to allow for expression of the antibody in the host cells or, more preferably, secretion of the antibody into the culture medium in which the host cells are grown. Antibodies can be recovered from the culture medium using standard protein purification methods.

[0254] In another embodiment, antibodies that bind FGFR can be isolated from antibody libraries generated using well know techniques such as those described in, for example, U.S. Pat. Nos. 5,223,409; 5,403,484; and U.S. Pat. No. 5,571,698 to Ladner et al.; U.S. Pat. No. 5,427,908 and U.S. Pat. No. 5,580,717 to Dower et al.; U.S. Pat. No. 5,969,108 and U.S. Pat. No. 6,172,197 to McCafferty et al.; and U.S. Pat. Nos. 5,885,793; 6,521,404; 6,544,731; 6,555,313; 6,582,915 and U.S. Pat. No. 6,593,081 to Griffiths et al.. Additionally, production of high affinity (nM range) human antibodies by chain shuffling, as well as combinatorial infection and in vivo recombination as a strategy for constructing very large phage libraries may also be used. See, e.g., U.S. patent application Ser. No. 09/856,907 (PCT Int. Pub. No. WO 00/31246)

[0255] In a particular embodiment, the monoclonal antibody that binds FGFR is produced using phage display. This technique involves the generation of a human Fab library having a unique combination of immunoglobulin sequences isolated from human donors and having synthetic diversity in the heavy-chain CDRs is generated. The library is then screened for Fabs that bind to FGFR.

[0256] In yet another embodiment, human monoclonal antibodies directed against FGFR can be generated using transgenic or transchromosomic mice carrying parts of the human immune system rather than the mouse system (see e.g., U.S. Pat. Nos. 5,545,806; 5,569,825; 5,625,126; 5,633,425; 5,789,650; 5,877,397; 5,661,016; 5,814,318; 5,874,299; and U.S. Pat. No. 5,770,429; all to Lonberg and Kay; U.S. Pat. No. 5,545,807 to Surani et al.; PCT Publication Nos. WO 92/03918, WO 93/12227, WO 94/25585, WO 97/13852, WO 98/24884 and WO 99/45962, all to Lonberg and Kay; and PCT Publication No. WO 01/14424 to Korman et al.).

[0257] In another embodiment, human antibodies can be raised using a mouse that carries human immunoglobulin sequences on transgenes and transchomosomes, such as a mouse that carries a human heavy chain transgene and a human light chain transchromosome (see e.g., PCT Publication WO 02/43478 to Ishida et al.).

[0258] Still further, alternative transgenic animal systems expressing human immunoglobulin genes are available in the art and can be used to raise anti-FGFR antibodies. For example, an alternative transgenic system referred to as the Xenomouse (Abgenix, Inc.) can be used; such mice are described in, for example, U.S. Pat. Nos. 5,939,598; 6,075,181; 6,114,598; 6, 150,584 and U.S. Pat. No. 6,162,963 to Kucherlapati et al. Another suitable transgenic animal system is the HuMAb mouse (Medarex, Inc), which contains human immunoglobulin gene miniloci that encode unrearranged human heavy (μ and γ) and κ light chain immunoglobulin sequences, together with targeted mutations that inactivate the endogenous μ and κ chain loci (see e.g., Lonberg, et al. (1994) Nature 368(6474): 856-859). Yet another suitable transgenic animal system is the KM mouse, described in detail in PCT publication W002/43478.

[0259] Alternative transchromosomic animal systems expressing human immunoglobulin genes are available in the art and can be used to raise anti-FGFR antibodies. For example, mice carrying both a human heavy chain transchromosome and a human light chain tranchromosome can be used. Furthermore, cows carrying human heavy and light chain transchromosomes have been described in the art and can be used to raise anti-FGFR antibodies.

[0260] In yet another embodiment, antibodies can be prepared using a transgenic plant and/or cultured plant cells (such as, for example, tobacco, maize and duckweed) that produce such antibodies. For example, transgenic tobacco leaves expressing antibodies can be used to produce such antibodies by, for example, using an inducible promoter. Also, transgenic maize can be used to express such antibodies and antigen binding portions thereof. Antibodies can also be produced in large amounts from transgenic plant seeds including antibody portions, such as single chain antibodies (scFv's), for example, using tobacco seeds and potato tubers.

[0261] The binding specificity of monoclonal antibodies (or portions thereof) that bind FGFR prepared using any technique including those disclosed here, can be determined by immunoprecipitation or by an in vitro binding assay, such as radioimmunoassay (RIA) or enzyme-linked immunoabsorbent assay (ELISA). The binding affinity of a monoclonal antibody or portion thereof also can be determined by Scatchard analysis.

[0262] In certain embodiments, an anti-FGFR antibody produced using any of the methods discussed above may be further altered or optimized to achieve a desired binding specificity and/or affinity using art recognized techniques, such as those described herein.

### VI. Multispecific Antibodies

[0263] Multispecific antibodies provided herein include at least a binding affinity for one or more FGFR proteins (e.g., human FGFR1c, FGFR2c, FGFR3c, and/or FGFR4), such as an anti-FGFR antibody described herein, and at least one other non-FGFR binding specificity. In some embodiments, the non-FGFR binding specificity is a binding specificity for a cancer antigen. Multispecific antibodies can be prepared as full length antibodies or antibody fragments (e.g. F(ab′)₂ antibodies).

[0264] Methods for making multispecific antibodies are well known in the art (see, e.g., WO 05117973 and WO 06091209). For example, production of full length multispecific antibodies can be based on the coexpression of two paired immunoglobulin heavy chain-light chains, where the two chains have different specificities. Various techniques for making and isolating multispecific antibody fragments directly from recombinant cell culture have also been described. For example, multispecific antibodies can be produced using leucine zippers. Another strategy for making multispecific antibody fragments by the use of single-chain Fv (sFv) dimers has also been reported.

[0265] In a particular embodiment, the multispecific antibody comprises a first antibody (or binding portion thereof) which binds to an FGFR protein derivatized or linked to another functional molecule, e.g., another peptide or protein (e.g., another antibody or ligand for a receptor) to generate a multispecific molecule that binds to one or more of FGFR1c, FGFR2c, FGFR3c, and/or FGFR4 and a non-FGFR target molecule. An antibody may be derivatized or linked to more than one other functional molecule to generate multispecific molecules that bind to more than two different binding sites and/or target molecules. To create a multispecific molecule, an antibody disclosed herein can be functionally linked (e.g., by chemical coupling, genetic fusion, noncovalent association or otherwise) to one or more other binding molecules, such as another antibody, antibody fragment, peptide or binding mimetic, such that a multispecific molecule results.

[0266] Accordingly, multispecific molecules comprising at least one first binding specificity for an FGFR protein (e.g., human FGFR1c, FGFR2c, FGFR3c, and/or FGFR4) and a second binding specificity for a second non-FGFR target epitope are contemplated. In a particular embodiment, the second target epitope is an Fc receptor, e.g., human FcγRI (CD64) or a human Fcα receptor (CD89). Therefore, multispecific molecules capable of binding both to FcγR, FcαR or FcεR expressing effector cells (e.g., monocytes, macrophages or polymorphonuclear cells (PMNs)), and to target cells expressing FGFR are also provided. These multispecific molecules target FGFR-expressing cells to effector cells and trigger Fc receptor-mediated effector cell activities, such as phagocytosis of FGFR-expressing cells, antibody dependent cell-mediated cytotoxicity (ADCC), cytokine release, or generation of superoxide anion.

[0267] In one embodiment, the multispecific molecules comprise as a binding specificity at least one antibody, or an antibody fragment thereof, including, e.g., an Fab, Fab′, F(ab′)₂, Fv, or a single chain Fv. The antibody may also be a light chain or heavy chain dimer, or any minimal fragment thereof such as a Fv or a single chain construct as described in Ladner et al. U.S. Pat. No. 4,946,778.

[0268] The multispecific molecules can be prepared by conjugating the constituent binding specificities, e.g., the anti-FcR and anti-FGFR binding specificities, using methods known in the art. For example, each binding specificity of the multispecific molecule can be generated separately and then conjugated to one another. When the binding specificities are proteins or peptides, a variety of coupling or cross-linking agents can be used for covalent conjugation. Examples of cross-linking agents include protein A, carbodiimide, N-succinimidyl-S-acetyl-thioacetate (SATA), 5,5′-dithiobis(2-nitrobenzoic acid) (DTNB), o-phenylenedimaleimide (oPDM), N-succinimidyl-3-(2-pyridyldithio)propionate (SPDP), and sulfosuccinimidyl 4-(N-maleimidomethyl) cyclohaxane-l-carboxylate (sulfo-SMCC). Preferred conjugating agents are SATA and sulfo-SMCC, both available from Pierce Chemical Co. (Rockford, Ill.).

[0269] When the binding specificities are antibodies, they can be conjugated via sulfhydryl bonding of the C-terminus hinge regions of the two heavy chains. In a particularly preferred embodiment, the hinge region is modified to contain an odd number of sulfhydryl residues, preferably one, prior to conjugation.

[0270] Alternatively, both binding specificities can be encoded in the same vector and expressed and assembled in the same host cell. This method is particularly useful where the multispecific molecule is a mAb×mAb, mAb×Fab, Fab×F(ab′)₂ or ligand×Fab fusion protein. A multispecific molecule can be a single chain molecule comprising one single chain antibody and a binding determinant, or a single chain bispecific molecule comprising two binding determinants. Multispecific molecules may comprise at least two single chain molecules. Methods for preparing multispecific molecules are described for example in U.S. Pat. No. 5,260,203; U.S. Pat. No. 5,455,030; U.S. Pat. No. 4,881,175; U.S. Pat. No. 5,132,405; U.S. Pat. No. 5,091,513; U.S. Pat. No. 5,476,786; U.S. Pat. No. 5,013,653; U.S. Pat. No. 5,258,498; and U.S. Pat. No. 5,482,858.

[0271] Binding of the multispecific molecules to their specific targets can be confirmed by, for example, enzyme-linked immunosorbent assay (ELISA), radioimmunoassay (RIA), FACS analysis, bioassay (e.g., growth inhibition), or western blot assay. Each of these assays generally detects the presence of protein-antibody complexes of particular interest by employing a labeled reagent (e.g., an antibody) specific for the complex of interest. For example, the FcR-antibody complexes can be detected using e.g., an enzyme-linked antibody or antibody fragment which recognizes and specifically binds to the antibody-FcR complexes. Alternatively, the complexes can be detected using any of a variety of other immunoassays. For example, the antibody can be radioactively labeled and used in a radioimmunoassay (RIA). The radioactive isotope can be detected by such means as the use of a αγ-β counter or a scintillation counter or by autoradiography.

### VII. Immunoconjugates

[0272] Immunoconjugates provided herein can be formed by conjugating the antibodies described herein to another therapeutic agent. Suitable agents include, for example, a cytotoxic agent (e.g., a chemotherapeutic agent), a toxin (e.g. an enzymatically active toxin of bacterial, fungal, plant or animal origin, or fragments thereof), and/or a radioactive isotope (i.e., a radioconjugate).

[0273] Enzymatically active toxins and fragments thereof which can be used include diphtheria A chain, nonbinding active fragments of diphtheria toxin, exotoxin A chain (from Pseudomonas aeruginosa), ricin A chain, abrin A chain, modeccin A chain, alpha-sarcin, Aleurites fordii proteins, dianthin proteins, Phytolaca americana proteins (PAPI, PAPII, and PAP-S), momordica charantia inhibitor, curcin, crotin, sapaonaria officinalis inhibitor, gelonin, mitogellin, restrictocin, phenomycin, neomycin, and the tricothecenes. Additional examples of cytotoxins or cytotoxic agents include, e.g., taxol, cytochalasin B, gramicidin D, ethidium bromide, emetine, mitomycin, etoposide, tenoposide, vincristine, vinblastine, colchicin, doxorubicin, daunorubicin, dihydroxy anthracin dione, mitoxantrone, mithramycin, actinomycin D, 1-dehydrotestosterone, glucocorticoids, procaine, tetracaine, lidocaine, propranolol, and puromycin and analogs or homologs thereof. Therapeutic agents include, but are not limited to, antimetabolites (e.g., methotrexate, 6-mercaptopurine, 6-thioguanine, cytarabine, 5-fluorouracil decarbazine), alkylating agents (e.g., mechlorethamine, thioepa chlorambucil, melphalan, carmustine (BSNU) and lomustine (CCNU), cyclothosphamide, busulfan, dibromomannitol, streptozotocin, mitomycin C, and cis-dichlorodiamine platinum (II) (DDP) cisplatin), anthracyclines (e.g., daunorubicin (formerly daunomycin) and doxorubicin), antibiotics (e.g., dactinomycin (formerly actinomycin), bleomycin, mithramycin, and anthramycin (AMC)), and anti-mitotic agents (e.g., vincristine and vinblastine).

[0274] A variety of radionuclides are available for the production of radioconjugated anti-FGFR antibodies. Examples include ²¹²Bi, ¹³¹I, ¹³¹In, ⁹⁰Y and ¹⁸⁶Re.

[0275] Immunoconjugates can also be used to modify a given biological response, and the drug moiety is not to be construed as limited to classical chemical therapeutic agents. For example, the drug moiety may be a protein or polypeptide possessing a desired biological activity (e.g., lymphokines, tumor necrosis factor, IFNγ, growth factors).

[0276] Immunoconjugates can be made using a variety of bifunctional protein coupling agents such as N-succinimidyl-3-(2-pyridyldithiol) propionate (SPDP), iminothiolane (IT), bifunctional derivatives of imidoesters (such as dimethyl adipimidate HCL), active esters (such as disuccinimidyl suberate), aldehydes (such as glutareldehyde), bis-azido compounds (such as bis (p-azidobenzoyl) hexanediamine), bis-diazonium derivatives (such as bis-(p-diazoniumbenzoyl)-ethylenediamine), diisocyanates (such as tolyene 2,6-diisocyanate), and bis-active fluorine compounds (such as 1,5-difluoro-2,4-dinitrobenzene). Carbon-14-labeled 1-isothiocyanatobenzyl-3-methyldiethylene triaminepentaacetic acid (MX-DTPA) is an exemplary chelating agent for conjugation of radionucleotide to the antibody (see, e.g., W094/11026).

[0277] Techniques for conjugating such therapeutic moiety to antibodies are well known, see, e.g., Arnon et al., “Monoclonal Antibodies For Immunotargeting Of Drugs In Cancer Therapy”, in Monoclonal Antibodies And Cancer Therapy, Reisfeld et al. (eds.), pp. 243-56 (Alan R. Liss, Inc. 1985); Hellstrom et al., “Antibodies For Drug Delivery”, in Controlled Drug Delivery (2nd Ed.), Robinson et al. (eds.), pp. 623-53 (Marcel Dekker, Inc. 1987); Thorpe, “Antibody Carriers Of Cytotoxic Agents In Cancer Therapy: A Review”, in Monoclonal Antibodies '84: Biological And Clinical Applications, Pinchera et al. (eds.), pp. 475-506 (1985); “Analysis, Results, And Future Prospective Of The Therapeutic Use Of Radiolabeled Antibody In Cancer Therapy”, in Monoclonal Antibodies For Cancer Detection And Therapy, Baldwin et al. (eds.), pp. 303-16 (Academic Press 1985), and Thorpe et al., “The Preparation And Cytotoxic Properties Of Antibody-Toxin Conjugates”, Immunol. Rev., 62:119-58 (1982).

### VIII. Assays

[0278] Subsequent to producing antibodies, they can be screened for various properties, such as those described herein, using a variety of assays known in the art.

[0279] In one embodiment, the antibodies are screened (e.g., by flow cytometry, ELISA, Biacore, or ForteBio assay) for binding to FGFR using, for example, purified FGFR and/or FGFR-expres sing cells. The epitopes bound by the anti-FGFR antibodies can further be identified and compared, for example, to identify non-competing antibodies (e.g., antibodies that bind different epitopes), as well as antibodies which compete for binding and/or bind the same or overlapping epitopes.

[0280] Competitive antibodies and non-competitive antibodies can be identified using routine techniques. Such techniques include, for example, an immunoassay, which shows the ability of one antibody to block (or not block) the binding of another antibody to a target antigen, i.e., a competitive binding assay. Competitive binding is determined in an assay in which the immunoglobulin under test inhibits specific binding of a reference antibody to a common antigen, such as FGFR. Numerous types of competitive binding assays are known, for example: solid phase direct or indirect radioimmunoassay (RIA), solid phase direct or indirect enzyme immunoassay (EIA), sandwich competition assay; solid phase direct biotin-avidin EIA; solid phase direct labeled assay, solid phase direct labeled sandwich assay; solid phase direct ¹²⁵I labeled RIA; solid phase direct biotin-avidin EIA; and direct labeled RIA. Surface plasmon resonance can also be used for this purpose. Typically, such an assay involves the use of purified antigen bound to a solid surface or cells bearing either of these, an unlabeled test immunoglobulin, and a labeled reference immunoglobulin. Competitive inhibition is measured by determining the amount of label bound to the solid surface or cells in the presence of the test immunoglobulin. The test immunoglobulin is typically present in excess. Usually, when a competing antibody is present in excess, it will inhibit specific binding of a reference antibody to a common antigen by at least 30%, at least 40%, at least 50%, at least 60%, at least 70%, at least 80%, at least 90%, at least 95%, or more.

[0281] Other screening techniques for determining the epitope bound by antibodies disclosed herein include, for example, x-ray analysis of crystals of antigen:antibody complexes, which provides atomic resolution of the epitope. Other methods monitor the binding of the antibody to antigen fragments or mutated variations of the antigen where loss of binding due to a modification of an amino acid residue within the antigen sequence is often considered an indication of an epitope component. In addition, computational combinatorial methods for epitope mapping can also be used. These methods rely on the ability of the antibody of interest to affinity isolate specific short peptides from combinatorial phage display peptide libraries. The peptides are then regarded as leads for the definition of the epitope corresponding to the antibody used to screen the peptide library. For epitope mapping, computational algorithms have also been developed which have been shown to map conformational discontinuous epitopes.

[0282] In another embodiment, the antibodies (e.g., non-competing anti-FGFR antibodies) are screened for the ability to bind to epitopes exposed upon binding to ligand, e.g., FGF1 (i.e., do not inhibit the binding of FGFR-binding ligands to FGFR). Such antibodies can be identified by, for example, contacting cells which express FGFR with a labeled FGFR ligand (e.g., radiolabeled or biotinylated FGF) in the absence (control) or presence of the anti-FGFR antibody. If the antibody does not inhibit FGF binding to FGFR, then no statistically significantly decrease in the amount of label recovered, relative to the amount in the absence of the antibody, will be observed. Alternatively, if the antibody inhibits FGF binding to FGFR, then a statistically significantly decrease in the amount of label recovered, relative to the amount in the absence of the antibody, will be observed.

[0283] Methods for analyzing binding affinity, cross-reactivity, and binding kinetics of various anti-FGFR antibodies include standard assays known in the art, for example, Biacore surface plasmon resonance (SPR) analysis using a Biacore 2000 SPR instrument (Biacore AB, Uppsala, Sweden) or bio-layer interferometry (e.g., ForteBio assay), as described in the Examples.

[0284] Antibodies also can be screened for their ability to inhibit signaling through FGFR using signaling assays, such as those described in the Examples. In one embodiment, the ability of an antibody to inhibit FGFR ligand-mediated phosphorylation of ERK can be assessed by treating cells expressing FGFR (e.g., FGFR1c, FGFR2c, FGFR3c, and/or FGFR4) with an FGFR ligand (e.g., FGF1) in the presence and absence of the antibody. The cells can then be lysed, crude lysates centrifuged to remove insoluble material, EGF phosphorylation measured, for example, by western blotting followed by probing with an antibody which specifically recognizes phosphorylated ERK, and IC50 and/or IC90 values determined.

[0285] Antibodies can also be tested for their ability to inhibit the proliferation or viability of cells expressing FGFR(s) (either in vivo or in vitro), such as tumor cells, using art recognized techniques, including the Cell Titer-Glo Assay described in the Examples or a tritium-labeled thymidine incorporation assay.

### IX. Compositions

[0286] In another aspect, provided herein is a composition, e.g., a pharmaceutical composition, containing an anti-FGFR antibody disclosed herein, formulated together with a pharmaceutically acceptable carrier. Pharmaceutical compositions are prepared using standard methods known in the art by mixing the active ingredient (e.g., anti-FGFR antibodies described herein) having the desired degree of purity with optional physiologically acceptable carriers, excipients or stabilizers (Remington's Pharmaceutical Sciences (20^{th} edition), ed. A. Gennaro, 2000, Lippincott, Williams & Wilkins, Philadelphia, Pa.). In one embodiment, the composition includes a combination of multiple (e.g., two, three, or four antibodies) isolated anti-FGFR antibodies which collectively bind to human FGFR1c, FGFR2c, FGFR3c, and FGFR4. In another embodiment, the composition includes an antibody which binds to FGFR1c, FGFR2c, FGFR3c, and FGFR4. In some embodiments, the anti-FGFR antibodies do not bind to FGFR1b, FGFR2b, and/or FGFR3b. Preferred pharmaceutical compositions are sterile compositions, compositions suitable for injection, and sterile compositions suitable for injection by a desired route of administration, such as by intravenous injection.

[0287] As used herein, “pharmaceutically acceptable carrier” includes any and all solvents, dispersion media, coatings, antibacterial and antifungal agents, isotonic and absorption delaying agents, and the like that are physiologically compatible. Preferably, the carrier is suitable for intravenous, intramuscular, subcutaneous, parenteral, spinal or epidermal administration (e.g., by injection or infusion). Depending on the route of administration, the active compound, i.e., antibody, may be coated in a material to protect the compound from the action of acids and other natural conditions that may inactivate the compound.

[0288] Compositions can be administered alone or in combination therapy, i.e., combined with other agents. For example, the combination therapy can include a composition provided herein with at least one or more additional therapeutic agents, e.g., other compounds, drugs, and/or agents used for the treatment of cancer (e.g., an anti-cancer agent(s). Particular combinations of anti-FGFR antibodies may also be administered separately or sequentially, with or without additional therapeutic agents.

[0289] Compositions can be administered by a variety of methods known in the art. As will be appreciated by the skilled artisan, the route and/or mode of administration will vary depending upon the desired results. The antibodies can be prepared with carriers that will protect the antibodies against rapid release, such as a controlled release formulation, including implants, transdermal patches, and microencapsulated delivery systems. Biodegradable, biocompatible polymers can be used, such as ethylene vinyl acetate, polyanhydrides, polyglycolic acid, collagen, polyorthoesters, and polylactic acid. Many methods for the preparation of such formulations are patented or generally known to those skilled in the art.

[0290] To administer compositions by certain routes of administration, it may be necessary to coat the constituents, e.g., antibodies, with, or co-administer the compositions with, a material to prevent its inactivation. For example, the compositions may be administered to a subject in an appropriate carrier, for example, liposomes, or a diluent. Acceptable diluents include saline and aqueous buffer solutions. Liposomes include water-in-oil-in-water CGF emulsions as well as conventional liposomes.

[0291] Acceptable carriers include sterile aqueous solutions or dispersions and sterile powders for the extemporaneous preparation of sterile injectable solutions or dispersion. The use of such media and agents for pharmaceutically active substances is known in the art. Except insofar as any conventional medium or agent is incompatible with the antibodies, use thereof in compositions provided herein is contemplated. Supplementary active constituents can also be incorporated into the compositions.

[0292] Therapeutic compositions typically must be sterile and stable under the conditions of manufacture and storage. The composition can be formulated as a solution, microemulsion, liposome, or other ordered structure suitable to high drug concentration. The carrier can be a solvent or dispersion medium containing, for example, water, ethanol, polyol (for example, glycerol, propylene glycol, and liquid polyethylene glycol, and the like), and suitable mixtures thereof. The proper fluidity can be maintained, for example, by the use of a coating such as lecithin, by the maintenance of the required particle size in the case of dispersion and by the use of surfactants. In many cases, it will be preferable to include isotonic agents, for example, sugars, polyalcohols such as mannitol, sorbitol, or sodium chloride in the composition. Including in the composition an agent that delays absorption, for example, monostearate salts and gelatin can bring about prolonged absorption of the injectable compositions.

[0293] Sterile injectable solutions can be prepared by incorporating the monoclonal antibodies in the required amount in an appropriate solvent with one or a combination of ingredients enumerated above, as required, followed by sterilization microfiltration. Generally, dispersions are prepared by incorporating the antibodies into a sterile vehicle that contains a basic dispersion medium and the required other ingredients from those enumerated above. In the case of sterile powders for the preparation of sterile injectable solutions, the preferred methods of preparation are vacuum drying and freeze-drying (lyophilization) that yield a powder of the active ingredient plus any additional desired ingredient from a previously sterile-filtered solution thereof.

[0294] Dosage regimens are adjusted to provide the optimum desired response (e.g., a therapeutic response). For example, a single bolus may be administered, several divided doses may be administered over time or the dose may be proportionally reduced or increased as indicated by the exigencies of the therapeutic situation. For example, human antibodies may be administered once or twice weekly by subcutaneous injection or once or twice monthly by subcutaneous injection.

[0295] It is especially advantageous to formulate parenteral compositions in dosage unit form for ease of administration and uniformity of dosage. Dosage unit form as used herein refers to physically discrete units suited as unitary dosages for the subjects to be treated; each unit contains a predetermined quantity of antibodies calculated to produce the desired therapeutic effect in association with the required pharmaceutical carrier. The specification for the dosage unit forms provided herein are dictated by and directly dependent on (a) the unique characteristics of the antibodies and the particular therapeutic effect to be achieved, and (b) the limitations inherent in the art of compounding such antibodies for the treatment of sensitivity in individuals.

[0296] Examples of pharmaceutically-acceptable antioxidants include: (1) water soluble antioxidants, such as ascorbic acid, cysteine hydrochloride, sodium bisulfate, sodium metabisulfite, sodium sulfite and the like; (2) oil-soluble antioxidants, such as ascorbyl palmitate, butylated hydroxyanisole (BHA), butylated hydroxytoluene (BHT), lecithin, propyl gallate, alpha-tocopherol, and the like; and (3) metal chelating agents, such as citric acid, ethylenediamine tetraacetic acid (EDTA), sorbitol, tartaric acid, phosphoric acid, and the like.

[0297] For the therapeutic compositions, formulations include those suitable for oral, nasal, topical (including buccal and sublingual), rectal, and parenteral administration. Parenteral administration is the most common route of administration for therapeutic compositions comprising antibodies. The formulations may conveniently be presented in unit dosage form and may be prepared by any methods known in the art of pharmacy. The amount of antibodies that can be combined with a carrier material to produce a single dosage form will vary depending upon the subject being treated, and the particular mode of administration. This amount of antibodies will generally be an amount sufficient to produce a therapeutic effect. Generally, out of 100%, this amount will range from about 0.001% to about 90% of antibody by mass, preferably from about 0.005% to about 70%, most preferably from about 0.01% to about 30%.

[0298] The phrases “parenteral administration” and “administered parenterally” as used herein means modes of administration other than enteral and topical administration, usually by injection, and includes, without limitation, intravenous, intramuscular, intraarterial, intrathecal, intraventricular, intracapsular, intraorbital, intracardiac, intradermal, intraperitoneal, transtracheal, subcutaneous, subcuticular, intraarticular, subcapsular, subarachnoid, intraspinal, epidural and intrasternal injection and infusion.

[0299] Examples of suitable aqueous and nonaqueous carriers which may be employed in the pharmaceutical compositions provided herein include water, ethanol, polyols (such as glycerol, propylene glycol, polyethylene glycol, and the like), and suitable mixtures thereof, vegetable oils, such as olive oil, and injectable organic esters, such as ethyl oleate. Proper fluidity can be maintained, for example, by the use of coating materials, such as lecithin, by the maintenance of the required particle size in the case of dispersions, and by the use of surfactants.

[0300] These compositions may also contain adjuvants such as preservatives, wetting agents, emulsifying agents and dispersing agents. Particular examples of adjuvants which are well-known in the art include, for example, inorganic adjuvants (such as aluminum salts, e.g., aluminum phosphate and aluminum hydroxide), organic adjuvants (e.g., squalene), oil-based adjuvants, virosomes (e.g., virosomes which contain a membrane-bound heagglutinin and neuraminidase derived from the influenza virus).

[0301] Prevention of presence of microorganisms may be ensured both by sterilization procedures and by the inclusion of various antibacterial and antifungal agents, for example, paraben, chlorobutanol, phenol sorbic acid, and the like. It may also be desirable to include isotonic agents, such as sugars, sodium chloride, and the like into the compositions. In addition, prolonged absorption of the injectable pharmaceutical form may be brought about by the inclusion of one or more agents that delay absorption such as aluminum monostearate or gelatin.

[0302] When compositions are administered as pharmaceuticals, to humans and animals, they can be given alone or as a pharmaceutical composition containing, for example, 0.001 to 90% (more preferably, 0.005 to 70%, such as 0.01 to 30%) of active ingredient in combination with a pharmaceutically acceptable carrier.

[0303] Regardless of the route of administration selected, compositions provided herein, may be used in a suitable hydrated form, and they may be formulated into pharmaceutically acceptable dosage forms by conventional methods known to those of skill in the art.

[0304] Actual dosage levels of the antibodies in the pharmaceutical compositions provided herein may be varied so as to obtain an amount of the active ingredient which is effective to achieve the desired therapeutic response for a particular patient, composition, and mode of administration, without being toxic to the patient. The selected dosage level will depend upon a variety of pharmacokinetic factors including the activity of the particular compositions employed, or the ester, salt or amide thereof, the route of administration, the time of administration, the rate of excretion of the particular compound being employed, the duration of the treatment, other drugs, compounds and/or materials used in combination with the particular compositions employed, the age, sex, weight, condition, general health and prior medical history of the patient being treated, and like factors well known in the medical arts. A physician or veterinarian having ordinary skill in the art can readily determine and prescribe the effective amount of the composition required. For example, the physician or veterinarian could start doses of the antibodies at levels lower than that required to achieve the desired therapeutic effect and gradually increasing the dosage until the desired effect is achieved. In general, a suitable daily dose of compositions provided herein will be that amount of the antibodies which is the lowest dose effective to produce a therapeutic effect. Such an effective dose will generally depend upon the factors described above. It is preferred that administration be intravenous, intramuscular, intraperitoneal, or subcutaneous, preferably administered proximal to the site of the target. If desired, the effective daily dose of a therapeutic composition may be administered as two, three, four, five, six or more sub-doses administered separately at appropriate intervals throughout the day, optionally, in unit dosage forms. While it is possible for antibodies to be administered alone, it is preferable to administer antibodies as a formulation (composition).

[0305] Dosages and frequency of administration may vary according to factors such as the route of administration and the particular antibody used, the nature and severity of the disease to be treated, and the size and general condition of the subject. Appropriate dosages can be determined by procedures known in the pertinent art, e.g. in clinical trials that may involve dose escalation studies. An exemplary treatment regime entails administration once per week, once every two weeks, once every three weeks, once every four weeks, once a month, once every 3 months, or once every three to 6 months. In some embodiments, the antibodies described herein are administered at a flat dose (flat dose regimen).

[0306] Therapeutic compositions can be administered with medical devices known in the art, such as, for example, those disclosed in U.S. Pat. Nos. 5,399,163, 5,383,851, 5,312,335, 5,064,413, 4,941,880, 4,790,824, 4,596,556, 4,487,603, 4.,486,194, 4,447,233, 4,447,224, 4,439,196, and U.S. Pat. No. 4,475,196.

[0307] The ability of a compound to inhibit cancer can be evaluated in an animal model system predictive of efficacy in human tumors. Alternatively, this property of a composition can be evaluated by examining the ability of the compound to inhibit, such inhibition in vitro by assays known to the skilled practitioner. A therapeutically effective amount of a therapeutic compound can decrease tumor size, or otherwise ameliorate symptoms in a subject. One of ordinary skill in the art would be able to determine such amounts based on such factors as the subject's size, the severity of the subject's symptoms, and the particular composition or route of administration selected.

[0308] Uses of the above-described anti-FGFR antibodies and compositions comprising the same are provided in the manufacture of a medicament for the treatment of a disease associated with FGFR-dependent signaling. The above-described anti-FGFR antibodies and compositions are also provided for the treatment of cancer (or to be used in the manufacture of a medicament for the treatment of cancer), such as an FGFR-expressing cancer or a cancer with altered FGFR signaling. In some embodiments, the cancer is a mesenchymal-like solid tumors. Exemplary cancers include, but are not limited to, lung cancer, renal cancer, breast cancer, and ovarian cancer.

[0309] Additionally, contemplated compositions may further include, or be prepared for use as a medicament in combination therapy with, an additional therapeutic agent, e.g., an additional anti-cancer agent. An “anti-cancer agent” is a drug used to treat tumors, cancers, malignancies, and the like. Drug therapy (e.g., with antibody compositions disclosed herein) may be administered without other treatment, or in combination with other treatments.

[0310] A “therapeutically effective dosage” of an anti-FGFR antibody or composition described herein preferably results in a decrease in severity of disease symptoms, an increase in frequency and duration of disease symptom-free periods, or a prevention of impairment or disability due to the disease affliction. In the context of cancer, a therapeutically effective dose preferably results in increased survival, and/or prevention of further deterioration of physical symptoms associated with cancer. A therapeutically effective dose may prevent or delay onset of cancer, such as may be desired when early or preliminary signs of the disease are present.

### X. Kits

[0311] Also provided are kits comprising the anti-FGFR antibodies, multispecific molecules, or immunoconjugates disclosed herein, optionally contained in a single vial or container, and include, e.g., instructions for use in treating or diagnosing a disease associated with FGFR upregulation and/or FGFR-dependent signaling. The kits may include a label indicating the intended use of the contents of the kit. The term label includes any writing, marketing materials or recorded material supplied on or with the kit, or which otherwise accompanies the kit. Such kits may comprise the antibody, multispecific molecule, or immunoconjugate in unit dosage form, such as in a single dose vial or a single dose pre-loaded syringe.

### XI. Methods of Using Antibodies

[0312] Antibodies and compositions disclosed herein can be used in a broad variety of therapeutic and diagnostic applications, particularly oncological applications. Accordingly, in another aspect, provided herein are methods for inhibiting FGFR activity in a subject by administering one or more antibodies or compositions described herein in an amount sufficient to inhibit FGFR-mediated activity. Particular therapeutic indications which can be treated include, for example, cancers of organs or tissues such as lung, kidney, breast, and ovary.

[0313] Antibodies disclosed herein also can be used to diagnose or prognose diseases (e.g., cancers) associated with FGFR, for example, by contacting an antibody disclosed herein (e.g., ex vivo or in vivo) with cells from the subject, and measuring the level of binding to FGFR on the cells, wherein abnormally high levels of binding to FGFR indicate that the subject has a cancer associated with FGFR.

[0314] Also provided herein is a method of detecting the presence of FGFR (e.g., FGFR1c, FGFR2c, FGFR3c, and/or FGFR4) in a sample. In some embodiments, the method comprises contacting the sample with an anti-FGFR antibody described herein under conditions that allow for formation of a complex between the antibody and FGFR protein, and detecting the formation of a complex. In some embodiments, the anti-FGFR antibodies described herein can be used to detect the presence or expression levels of FGFR proteins on the surface of cells in cell culture or in a cell population. In another embodiment, the anti-FGFR antibodies described herein can be used to detect the amount of FGFR proteins in a biological sample (e.g., a biopsy). In yet another embodiment, the anti-FGFR antibodies described herein can be used in in vitro assays (e.g., immunoassays such as Western blot, radioimmunoassays, ELISA) to detect FGFR proteins. The anti-FGFR antibodies described herein can also be used for fluorescence activated cell sorting (FACS).

[0315] Also provided are methods of blocking FGF1 or FGF2 binding to FGFR1c, FGFR2c, FGFR3c, and/or FGFR4 in a cell comprising contacting the cell with an effective amount of an antibody described herein.

[0316] In some embodiments, provided herein are methods of inhibiting FGF-mediated signaling in a cell comprising contacting the cell with an effective amount of an antibody described herein.

[0317] Also provided are methods of using the anti-FGFR antibodies disclosed herein in a variety of ex vivo and in vivo diagnostic and therapeutic applications involving FGFR-dependent signaling, including a variety of cancers.

[0318] Accordingly, in one embodiment, a method is provided for treating a disease associated with FGFR-dependent signaling by administering to a subject an antibody provided herein in an amount effective (e.g., a therapeutically effective amount) to treat the disease. Suitable diseases include, for example, a variety of cancers including, but not limited to, mesenchymal-like solid tumors, such as subsets of lung cancer, renal cancer, breast cancer, and ovarian cancer.

[0319] In another embodiment, a method is provided for inhibiting the growth of tumor cells comprising administering to a subject an antibody described herein in a therapeutically effective amount.

[0320] In another embodiment, a method is provided for treating cancer comprising administering to a subject in need thereof a therapeutically effective amount of an IgG2 antibody that binds to FGFR1c.

[0321] In some embodiments, the antibody binds to FGFR2c, FGFR3c, and/or FGFR4. In some embodiments, the antibody does not bind to FGFR1b, FGFR2b, and/or FGFR3b. In some embodiments, administration of the antibody in the methods described above does not induce weight loss in the subject.

[0322] The antibody can be administered alone or with another therapeutic agent that acts in conjunction with or synergistically with the antibody to treat the disease associated with FGFR-mediated signaling.

[0323] The present invention is further illustrated by the following examples which should not be construed as further limiting. The contents of Sequence Listing, figures and all references, patents and published patent applications cited throughout this application are expressly incorporated herein by reference.

### EXAMPLES

[0324] Commercially available reagents referred to in the Examples below were used according to manufacturer's instructions unless otherwise indicated. Unless otherwise noted, the present invention uses standard procedures of recombinant DNA technology, such as those described hereinabove and in the following textbooks: Sambrook et al., supra; Ausubel et al., Current Protocols in Molecular Biology (Green Publishing Associates and Wiley Interscience, N.Y., 1989); Innis et al., PCR Protocols: A Guide to Methods and Applications (Academic Press, Inc.: N.Y., 1990); Harlow et al., Antibodies: A Laboratory Manual (Cold Spring Harbor Press: Cold Spring Harbor, 1988); Gait, Oligonucleotide Synthesis (IRL Press: Oxford, 1984); Freshney, Animal Cell Culture, 1987; Coligan et al., Current Protocols in Immunology, 1991.

### Example 1

### Targeting Multiple FGF Receptors Enhances Inhibition of Tumor Cell Viability

[0325] This Example demonstrates that targeting multiple FGF receptors (FGFRs) can significantly decrease downstream signaling activity.

[0326] FGFR1 has been reported to be the main driver of FGFR-related signaling in cancer. To test the hypothesis that targeting and inhibiting FGF2-dependent signaling downstream of FGFR1 is sufficient to inhibit cancer cell viability, we used a series of antibodies targeting individual or combinations of FGFRs: FGFR1 only, FGFR2+FGFR3, FGFR3 only, FGFR4 only, and FGFR1+FGFR2+FGFR3+FGFR4 (Ab15), and an FGFR1-driven cancer cell line, NCI-H2286. While the FGFR1-specific antibody reduced cell viability in this cell line, Ab15 showed superior activity (FIG. 1A). The same antibodies were tested in cancer cell lines with various expression levels of the individual FGFRs (IGROV1, Caki1, Ca151; FIGS. 1B-1D, respectively), and again Ab15 demonstrated superior activity. The relative levels of FGFR1-4 in these cell lines are shown in FIG. 1E. The activity of Ab15 in comparison to the other monospecific antibodies tested may be due to the fact that Ab15 binds to all four FGFRs (see Example 2) and reinforces the idea that targeting multiple FGFRs is necessary to substantially inhibit this pathway.

### Example 2

### Generation of Pan-FGFR Specific Binding Antibodies

[0327] Given the finding that targeting multiple FGFR receptors can enhance the therapeutic effects of anti-FGFR therapy, antibodies that specifically bind to all 4 FGFRs (FGFR1-4) were generated.

[0328] A summary of a subset of the anti-FGFR antibodies generated is provided with an alignment of heavy chain variable region sequences in FIG. 2.

### Example 3

### Cross-Reactivity of Anti-FGFR Antibodies with FGFR1c, FGFR2c, FGFR3c, and FGFR4

[0329] This Example describes the characterization of the cross-reactivity of the anti-FGFR antibodies generated in Example 2.

[0330] To characterize the novel anti-FGFR antibodies, their relative ability to bind to each individual FGFR in vitro was compared. A solid phase-based ELISA was used to measure the relative binding of the candidate antibodies to immobilized recombinant human FGFR1c, FGFR2c, FGFR3c, and FGFR4. EC50 binding curves were generated for a subset of candidates (FIGS. 3A-3D, respectively; Table 1).

[0331] For the ELISA assay, the ability of each mAb to cross react with the Mc isoform FGF receptors was tested across a concentration curve in order to determine the relative binding across FGFR1-4. FGFR2IIIb was used as a negative control. Black 384-well Maxisorp plates were coated overnight with FGFR-Fc fusions in PBS to 1 ug/ml before washing and blocking with 75 ul/well Pierce Protein Free (PBS) Blocking Buffer for 1 hour at RT. Antibody dilutions were prepared freshly in 1% BSA- PBS+0.05% Tween20 and 25 ul of each antibody was added to wells in duplicate. Plates were incubated at RT for 2 hours, followed by addition of detection antibody at 50 ng/ml in 1% BSA PBS, 0.05% Tween20. ECL substrate (Pierce) was added and plates were read on the EnVision plate reader.

[0332] As shown in FIG. 3E, none of the mAbs bound to FGFR2IIIb, indicating that these antibodies specifically target the Mc isoform rather than the IIIb isoform of FGFRs. The data in FIG. 3 illustrates that multiple candidates demonstrate binding properties consistent with cross-reactivity to all four FGFRs namely FGFR1c, FGFR2c, FGFR3c and FGFR4.

TABLE 1
EC50 values for anti-FGFR antibodies (in scFv format) binding to FGFR1c, FGFR2c, FGFR3c, and FGFR4

| EC50 [nM] | Ab5 | Ab4 | Ab12 | Ab14 | Ab15 | Ab13 | Ab7 | Ab9 | Ab3 |
|---|---|---|---|---|---|---|---|---|---|
| FGFR2IIIb | 0.06703 | 8.166 | 231.9 | ~556619 | ~79950 | ~103342 | ~96735 | 31.66 | ~108169 |
| FGFR1IIIc | 0.3041 | 0.2472 | 0.4619 | 128.6 | 0.2934 | 0.6607 | 0.2011 | 0.2204 | 0.3194 |
| FGFR2IIIc | 1.998 | 3.599 | ~53764 | 75.71 | 0.2474 | ~886911 | 1.47 | 1.927 | 0.6198 |
| FGFR3IIIc | 22.36 | 25.86 | 0.4475 | 77.19 | 0.3263 | 0.6464 | 1.356 | 0.3645 | 2.017 |
| FGFR4 | 2.539 | 0.5065 | 0.5304 | 71.97 | 0.3118 | 0.7363 | 0.2783 | 0.8632 | 1.075 |

### Example 4

### Anti-FGFR Antibodies Block the Binding of FGF Ligand to FGFR1 and FGFR4

[0333] This Example demonstrates the ability of candidate anti-FGFR antibodies to block the binding of ligand to FGF receptors.

[0334] To compare the ligand inhibitory potential of candidate anti-FGFR antibodies on FGF2-mediated ERK phosphorylation/activation, the AlphaScreen® SureFire® ERK 1/2 assay (cat # TGRTES500, Perkin Elmer, Waltham, Mass.) was performed. Ca151 cells were seeded at a density of 35,000 cells per well in 96-well plates and allowed to adhere overnight in complete medium consisting of RPMI supplemented with glutamine and 10% bovine serum albumin (BSA). The following day, all wells were washed with PBS and starved overnight in RPMI supplemented with 0.5% BSA (Sigma-Aldrich, St. Louis Mo., USA). Twenty-four hours later, cells were treated with a dilution series of each IgG diluted in RPMI/0.5% BSA for one hour prior to the addition of FGF1 or FGF2 (RnD Systems, Minn. USA) at 4 ng/ml for 10 min. Stimulation was halted by washing cells with ice cold PBS and the addition ice cold lysis buffer and storage at −80° C. AlphaScreen® SureFire® assays were performed according to the manufacturer's instructions. Data were analyzed using GraphPad Prism® software and plotted as a function of inhibition in comparison to ligand-only stimulated cells.

[0335] As shown in FIGS. 4A and 4B, a panel of FGFR targeting antibodies blocked pERK activation by FGF1 or FGF2, respectively. The data demonstrates that both FGF1 and FGF2 strongly activate pERK signaling in Ca151 cells and that targeting multiple FGFRs inhibits pERK activation.

### Example 5

### Isotype Switching, Characterization of mAb Formats, and Comparison of Weight Loss Induced by Anti-FGFRl Antibodies A1 and A1M5 in rodents

[0336] Sun et al. (Am J Physiol Endocrinol Metab 2007; 292:E964-76) previously reported that systemic delivery of the antagonist FGFR1 antibody, A1, caused potent but reversible hypophagia and weight loss in rodents and monkeys. This example demonstrates that antibody isotype and consequently immune effector functions contribute to the weight loss observed for this phenomenon in animals.

[0337] The A1 DNA sequence used in this Example was derived from the disclosure of WO 2005/037235 and modified with sequences to facilitate restriction enzyme digestion and cloning. The IgG2m4 sequence is described in An et al. (MAbs 2009;1:572-9), and was modified to include the C127S mutation. The genes were chemically synthesized using the DNA 2.0 expression system (Life Technologies, Grand Island, N.Y.) and cloned into the pCEP4 mammalian expression vector (Cat # V044-50, Life Technologies). Separate expression vectors were used to produce each protein chain (light and heavy) and co-expression of proteins was accomplished by co-transfection of selected combinations of vectors.

[0338] To ensure that isotype switching does not affect targeting of FGFR1, IgG1 and IgG2 formats of A1 (A1 and A1M5, respectively) were tested for solid-phase binding to FGFR1c-Fc by ELISA and in the signaling assay described in Example 4. FIG. 5 demonstrates that both A1 and A1M5 showed similar binding to FGFR1c. FIG. 6 demonstrates that both A1 (IgG1) and A1M5 (IgG2) inhibited FGF2-induced pERK activation with similar efficacy, albeit with A1M5 showing slightly more activity at the higher mAb concentrations. This data is in agreement with the FGFR1 binding ELISA (FIG. 5) and suggests that isotype does not grossly affect the activity of the two antibodies.

[0339] Next, the effect of isotype switching on the pharmacokinetic (PK) profile of A1 was tested in order to allow for a valid comparison of A1 and A1M5 antagonist activity (on-target effects) or isotype (off-target effects) on weight loss in vivo. To this end, the clearance rates of A1 and A1M5 from mice injected i.v. with a single dose of A1 and A1M5 were assessed by measuring plasma levels of human antibodies as a function of time. Specifically, normal female C57/BL6 mice were injected with 10 mg/kg of A1 or A1M5 and clearance rate was calculated by analysis of serum plasma levels of circulating human antibodies by ELISA as a function of time over 10 days.

[0340] As shown in Table 2, no significant difference was observed between the half-life of A1 and A1M5. Both A1 and A1M5 displayed a terminal half-life of approximately 180 hours, or about 1 week. This clearance rate is reported to be within the normal time range for clearance of human antibodies in mice.

TABLE 2
Pharmacokinetic profiles of A1 and
A1M5 monoclonal antibodies in mice

| | | | |
|---|---|---|---|
| IgG | No. of | Avg. half-life (h) | AUC |

| isotype | animals | α-phase | β-phase | (μg/mL/h) |
|---|---|---|---|---|
| IgG1A1 | 4 | 1.313 | 177.7 | 101.5 |
| IgG2M5 | 4 | 0.7523 | 159.7 | 100.6 |

Note:
AUC was calculated based on a bi-exponential fit of the data over 72 hours.

[0341] Taken together, these data indicate that swapping the isotype of A1 from IgG1 to an effector-reduced isotype (IgG2) does not compromise the activity or pharmacokinetic profile of A1. Accordingly, a valid comparison can be made on the relative contribution of antibody isotype to the weight loss observed with systemic administration of A1 to rodents and monkeys, as described by Sun et al. (supra).

[0342] To test this hypothesis, normal female C57BL/6 mice were injected with A1, A1M5, or a control monoclonal antibody at 1.0 and 10 mg/kg intraperitoneally (ip) three times per week for 2 weeks. Body weight and general health were recorded before treatment and every day during the treatment regime. To analyze the data, all weight changes were expressed as a percentage of the starting weight (g) and the experimental antibody weights of animal groups were plotted alongside antibody and saline controls to facilitate direct comparisons.

[0343] As shown in FIG. 7A, when A1 was dosed at 1 mg/kg, there was a significant decrease in body weight by day 4 that was not observed in the A1M5 or the control mAb. The weight loss observed for A1, but not A1M5 or controls, at 1 mg/kg was sustained during the two week treatment course. Furthermore, when the dose of antibodies was increased to 10 mg/kg, the weight loss observed for A1, but not A1M5 and controls, was more rapid than observed for the 1 mg/kg dose with a 10% loss of body weight observed on day 2 (FIG. 7B). As with the 1 mg/kg dose, the weight loss observed for A1, but not A1M5 or controls, at 10 mg/kg was sustained during the two week treatment course. As shown in FIG. 7C, when Ab15 (which has an M7 constant region) was dosed at 20 or 2 mg/kg, there was no significant decrease in body weight. These results suggest that the weight loss observed in mice with the A1 antibody is associated with the particular isotype used (IgG1), and that use of an antibody with reduced effector function (e.g., IgG2) could avoid the anorexic effects associated with the IgG1 isotype.

[0344] In another experiment, normal female C57BL/6 mice were injected with Ab15 variants with either no effector function (IgG2), full effector function (IgG1) or partial (IgG1/4) effector function at 1.0, 10 and 20 mg/kg intraperitoneally (ip) three times per week for 1 week. Body weight and general health were recorded before treatment and every day during the treatment regime. All weight changes were expressed as a percentage of the starting weight (g). As shown in FIG. 7D, when the Ab15 variants with either full or partial effector function were dosed at 10 or 20 mg/kg, there was a significant decrease in body weight by day 4. Ab15 in an IgG2 format was well tolerated and no weight loss was observed at any of the doses tested.

[0345] Furthermore, an experiment in which an antibody comprising the VH and VL region of an anti-FGFR1c antibody and the Fc regions of M9 (IgGl/IgG4 hybrid; SEQ ID NO: 1174) and M11 (IgG1 D265A/297Q; SEQ ID NO: 1175) caused weight loss similar to the A1 antibody.

### Example 6

### Anti-FGFR Antibodies Block the Binding of FGF Ligand to FGFR1 and FGFR4

[0346] This Example demonstrates the ability of candidate anti-FGFR antibodies to block the binding of ligand to FGFR1 and FGFR4 receptors using an in vitro binding assay. ELISA plates were coated with 50 ug/ml Heparin Sulfate (HSPG) (Sigma Aldrich) and incubated overnight at room temperature. Plates were then washed extensively with PBS containing 0.05% v/v Tween20 (PBST). Plates were then blocked with 2.5% BSA in PBST for one hour and washed extensively as before. 40-60 μL of FGF1 or FGF2 was then added to each well at 40 μg/ml and allowed to bind at room temperature for 2 hours. Plates were then washed extensively with PBST as before. Stock solutions of each 6His-Fc-FGFR (FGFR1-4) were prepared at 500 ng/ml in 2% v/v BSA-PBST and each antibody was prepared as a 2×-dilution series in 2% v/v BSA-PBST. Antibodies dilution series and 6His-Fc-FGFR1-4 were diluted in a 1:1 fashion and immediately added to the relative wells of the plate and allowed to bind for 2 hours at room temperature. Plates were washed extensively as before with PBST and the remaining fraction of bound 6His-Fc-FGFR was detected using a polyclonal-anti-His-6-HRP conjugated antibody (Abcam) for one hour at room temperature. After extensive washing with PBST, 50 μl of Pierce Chemiluminescent substrate (Thermo Fisher Scientific, Rockford, USA) was added and plates were measured on an Envision plate reader (Perkin Elmer). Raw data was background corrected and plotted using Prism software.

[0347] As shown in FIGS. 8A-8F, a panel of FGFR targeting antibodies blocked FGF1 binding to FGFR1 and FGFR4, respectively. The data demonstrates that multiple candidates bound to FGFR1 and FGFR4 and blocked ligand binding. Relative inhibitory capacity is presented in FIGS. 8A-8F). The data for blocking FGF2 binding to FGFR1c and FGFR4 is summarized in Table 3.

TABLE 3

| | IC50-FGFR1c [nM] | IC50-FGFR4 [nM] |
|---|---|---|
| Ab15 | 3.35 | 25.7 |
| Ab16 | 6.281 | 40.1 |
| Ab19 | 2.033 | 11.77 |
| Ab21 | 5.539 | 9.955 |
| Ab23 | 4.517 | 23.79 |
| Ab25 | 4.954 | 11.56 |
| Ab27 | 5.445 | 30.12 |
| Ab29 | 4.192 | 5.405 |
| Ab31 | 5.212 | 22.21 |
| Ab32 | 4.293 | 11.52 |
| Ab34 | 5.232 | 14.35 |
| Ab40 | 4.849 | 17.51 |
| Ab41 | 3.534 | 9.869 |
| Ab43 | 6.62 | 10.02 |
| Ab49 | 4.672 | 18.37 |
| Ab51 | 3.856 | 21.08 |
| Ab56 | 3.028 | 13.58 |
| Ab57 | 2.799 | 8.415 |
| Ab59 | 2.217 | ~6.857 |
| Ab60 | 3.834 | ~7.323 |
| Ab63 | 12.2 | 17.44 |
| Ab65 | 3.18 | 13.41 |
| Ab67 | 5.355 | 12.85 |
| Ab68 | 2.958 | 5.673 |
| Ab70 | 4.591 | 19.82 |
| Ab72 | 1.771 | 11.55 |
| Ab76 | 6.297 | 37.3 |
| Ab82 | 2.702 | 10.43 |
| Ab83 | 9.232 | 154.4 |
| Ab88 | 8.023 | 19 |
| Ab89 | 11.1 | 27.36 |
| Ab90 | 4.148 | 7.385 |
| Ab92 | 4.158 | 14.04 |

### Example 7

### Anti-FGFR Antibodies Block Activation of ERKIMAPK by Autocrine FGFR Ligand

[0348] This Example describes the characterization of the antagonist activities of candidate anti-FGFR antibodies by measuring their ability to block the activation of MAPK/ERK, a major signal transduction pathway directly downstream of FGFRs (Turner & Grose, 2010) in cellular systems.

[0349] An established assay that measures phosphorylated ERK (pERK) in cellular lysates (AlphaScreen SureFire) was used to assess the antagonist activities of the candidate anti-FGFR antibodies. This assay is an antibody-based assay which captures total ERK and measures the relative level of phosphorylation by means of a phosphorylation-specific antibody (Osmond et al., J Biomol Screen 2005; 10:730-7). The lung cancer cell line, NCI-H1581, has previously been shown to have an activated FGFR1 pathway driven by autocrine FGF18 (Weiss et al., Sci Transl Med 2010;2:62ra93). Consequently this cell line can be used to test FGFR targeting drugs.

[0350] Cells were seeded at 35,000 cells per well in 96-well plates. The following day, cells were incubated with a dilution series of candidate anti-FGFR antibodies (starting at 500 nM and with 3-fold dilutions) for 1 hour to allow binding of the antibody to FGFRs. The relative activation of pERK was calculated by comparison of signal strength to cells that were not incubated with the candidate antibodies, thereby allowing the calculation of relative IC50 values.

[0351] As shown in FIGS. 9A-9D,multiple candidates showed substantial inhibition of downstream signaling. The data is summarized in Table 4.

TABLE 4

| | IC50 [nM] |
|---|---|
| Ab15 | 4.12475 |
| Ab16 | 3.879 |
| Ab19 | 1.015 |
| Ab21 | 1.312 |
| Ab23 | 3.039 |
| Ab25 | 1.635 |
| Ab27 | 1.774 |
| Ab29 | 0.5404 |
| Ab31 | 2.717 |
| Ab32 | 2.55 |
| Ab34 | 4.835 |
| Ab60 | 0.3851 |
| Ab90 | 0.7152 |
| Ab92 | 1.912 |

### Example 8

### Anti-FGFR Antibodies Inhibit Viability of Tumor Cells

[0352] This Example demonstrates that anti-FGFR antibodies reduce the viability of tumor cells.

[0353] Each antibody was tested at a full concentration range to determine its relative inhibition of cell viability as measured by CellTiterGlo (CTG) in IGROV-1 cells (a human ovarian adenocarcinoma cell line). Cells were grown in complete growth medium (RPMI1640, 10% FBS, 1% Pen/Strep) and plated in 3% FBS on 96-well SCIVAX plates at 5,000 cells/well on Day 0. On Day 2 plates were examined for growth of cellular spheres and inhibitors of interest were added in 3-fold serial dilutions starting at 500 nM. Plates were placed in a TC incubator for three days before adding CTG reagent and reading chemiluminescence on a plate reader. As shown in FIG. 10, multiple FGFRIIIc targeting candidate antibodies reduced the viability of IGROV-1 cells. The data is summarized in Table 5.

TABLE 5

| | IC50 [nM] |
|---|---|
| Ab15 | 16.48 |
| Ab19 | 7.02 |
| Ab21 | 16.7 |
| Ab29 | 28.54 |
| Ab32 | 5.811 |

### Example 9

### Pharmacokinetic Comparison, Assessment of Efficacy, and Two Modes of Action of Pan-FGFR Antibodies in vivo

[0354] This Example describes the in vitro and in vivo characterization of Ab15 and Ab15 variants, and demonstrates their anti-tumor effects in mouse tumor models.

[0355] Table 6 shows the affinity of Ab15, Ab19, Ab60, Ab90, and Ab92 to FGFR1c, FGFR2c, FGFR3c, and FGFR4 using a solid phase ELISA as described in Example 3.

TABLE 6

| EC₅₀ [nM] | Ab15 | Ab19 | Ab60 | Ab90 | Ab92 |
|---|---|---|---|---|---|
| FGFR1c | 0.01120 | 0.006743 | 0.01165 | 0.01303 | 0.02419 |
| FGFR2c | 0.01470 | 0.01267 | 0.02240 | 0.03595 | 0.03248 |
| FGFR3c | 0.1291 | 0.07447 | 0.06873 | 0.1710 | 0.2642 |
| FGFR4c | 7.557 | 38.24 | 0.3104 | 1.262 | 13.05 |

[0356] Tables 7A and 7B show the affinity of Ab15, Ab19, Ab60, Ab90, Ab92, Vk1, Vk2, Vk3, Ab15, Vk5, Vk6, Vk7, Vk9, Vk10, Vk11, Vk12, Vk13, Ab15, Vk8, Vh1, and Vh2 for FGFR1c, FGFR2c, FGFR3c, and FGFR4 using the ForteBio assay, a bio-layer interferometery assay. Briefly, the Pall ForteBio Octet RED96 Bio-Layer Interferometry system was used to determine the specificity of anti-FGFR antibodies for FGFR1c, FGFR2c, FGFR3c, and FGFR4. The antibodies and soluble receptor proteins were prepared in PBS at a concentration of 300 nM. First, the candidate antibodies were immobilized on the surface of anti-human IgG Fc biosensor tips for 120 seconds. After immobilization, the biosensors were dipped in PBS solution for 60 seconds (baseline step) to assess assay drift, and determine loading level of antibodies. The baseline step was followed by an association step of 300 seconds wherein the binding interaction between the immobilized antibodies and soluble receptors was measured. Following the association step, the biosensors were dipped into PBS buffer for 600 seconds to measure the dissociation of the bound receptor proteins from the immobilized antibodies. Each binding response was measured and reported real time on a sensorgram trace. For data analysis, a simple 1:1 binding model was used which measures the rate of complex formation of one immobilized antibody and one soluble receptor protein.

TABLE 7A

| | FGFR1c | | | FGFR2c | | |
|---|---|---|---|---|---|---|
| | KD (M) | kon(1/Ms) | kdis(1/s) | KD (M) | kon(1/Ms) | kdis(1/s) |
| Ab15 | 1.37E−08 | 7.65E+04 | 1.21E−03 | 1.03E−08 | 1.83E+05 | 1.93E−03 |
| Ab19 | 8.85E−09 | 9.16E+04 | 9.67E−04 | 6.61E−09 | 2.52E+05 | 1.67E−03 |
| Ab60 | 1.45E−08 | 1.11E+05 | 1.65E−03 | 6.93E−09 | 2.54E+05 | 1.88E−03 |
| Ab90 | 1.20E−08 | 8.51E+04 | 1.16E−03 | 4.62E−09 | 2.18E+05 | 1.10E−03 |
| Ab92 | 2.00E−08 | 5.70E+04 | 1.29E−03 | 8.75E−09 | 1.47E+05 | 1.42E−03 |
| Vk1 | 4.70E−09 | 5.17E+04 | 2.43E−04 | 1.27E−08 | 1.93E+05 | 2.45E−03 |
| Vk2 | 5.74E−09 | 5.45E+04 | 3.13E−04 | 1.08E−08 | 2.11E+05 | 2.28E−03 |
| Vk3 | 4.79E−09 | 5.46E+04 | 2.62E−04 | 1.03E−08 | 2.14E+05 | 2.20E−03 |
| Ab15 | 4.72E−09 | 4.89E+04 | 2.31E−04 | 1.18E−08 | 1.99E+05 | 2.34E−03 |
| Vk5 | 3.98E−09 | 5.41E+04 | 2.15E−04 | 8.88E−09 | 1.98E+05 | 1.76E−03 |
| Vk6 | 6.45E−09 | 5.34E+04 | 3.44E−04 | 1.43E−08 | 2.19E+05 | 3.13E−03 |
| Vk7 | 5.84E−09 | 5.76E+04 | 3.36E−04 | 1.31E−08 | 2.10E+05 | 2.74E−03 |
| Vk9 | 2.39E−09 | 5.72E+04 | 1.37E−04 | 7.35E−09 | 2.34E+05 | 1.72E−03 |
| Vk10 | 5.33E−09 | 5.52E+04 | 2.94E−04 | 6.49E−09 | 2.20E+05 | 1.42E−03 |
| Vk11 | 7.62E−09 | 4.29E+04 | 3.27E−04 | 1.09E−08 | 2.12E+05 | 2.31E−03 |
| Vk12 | 6.51E−09 | 5.30E+04 | 3.45E−04 | 9.76E−09 | 2.15E+05 | 2.10E−03 |
| Vk13 | 7.33E−06 | 3.49E+04 | 2.56E−01 | 6.13E−06 | 1.04E+05 | 6.39E−01 |
| Ab15 | 7.39E−09 | 4.46E+04 | 3.30E−04 | 1.15E−08 | 2.05E+05 | 2.35E−03 |
| Vk8 | 2.51E−05 | 4.94E+03 | 1.24E−01 | 5.55E−08 | 6.26E+05 | 3.47E−02 |
| Vh1 | 7.49E−09 | 4.75E+04 | 3.56E−04 | 1.09E−08 | 2.21E+05 | 2.40E−03 |
| Vh2 | 5.41E−09 | 4.97E+04 | 2.69E−04 | 7.55E−09 | 2.07E+05 | 1.56E−03 |

[0357] *For Tables 7A and 7b, Vhl and Vh2 refer anti-FGFR antibodies in which Vh1 or Vh2 is combined with the VL of Ab15. Vk1, Vk2, Vk3, Vk5, Vk6, Vk7, Vk8, Vk9, Vk10, Vk11, Vk12, and Vk13 refer to anti-FGFR antibodies in which these Vks are combined with the VH of Ab15.

TABLE 7B

| | FGFR3c | | | FGFR4 | | |
|---|---|---|---|---|---|---|
| | KD (M) | kon(1/Ms) | kdis(1/s) | KD (M) | kon(1/Ms) | kdis(1/s) |
| Ab15 | 8.42E−09 | 1.21E+05 | 1.08E−03 | 1.12E−08 | 9.82E+04 | 1.24E−03 |
| Ab19 | 6.29E−09 | 1.51E+05 | 9.83E−04 | 8.63E−09 | 1.25E+05 | 1.20E−03 |
| Ab60 | 1.54E−08 | 1.54E+05 | 2.39E−03 | 1.25E−08 | 1.17E+05 | 1.69E−03 |
| Ab90 | 1.16E−08 | 1.26E+05 | 1.50E−03 | 6.69E−09 | 1.12E+05 | 8.87E−04 |
| Ab92 | 3.76E−08 | 7.56E+04 | 2.86E−03 | 4.03E−08 | 6.06E+04 | 2.48E−03 |
| Vk1 | 1.23E−08 | 1.13E+05 | 1.38E−03 | 8.75E−09 | 1.20E+05 | 1.05E−03 |
| Vk2 | 9.20E−09 | 1.20E+05 | 1.10E−03 | 7.06E−09 | 1.26E+05 | 8.88E−04 |
| Vk3 | 7.97E−09 | 1.26E+05 | 1.01E−03 | 6.79E−09 | 1.26E+05 | 8.55E−04 |
| Ab15 | 8.59E−09 | 1.23E+05 | 1.05E−03 | 7.35E−09 | 1.24E+05 | 9.10E−04 |
| Vk5 | 7.00E−09 | 1.27E+05 | 8.91E−04 | 6.05E−09 | 1.24E+05 | 7.52E−04 |
| Vk6 | 1.29E−08 | 1.21E+05 | 1.57E−03 | 9.31E−09 | 1.20E+05 | 1.12E−03 |
| Vk7 | 8.70E−09 | 1.20E+05 | 1.04E−03 | 8.33E−09 | 1.21E+05 | 1.01E−03 |
| Vk9 | 5.43E−09 | 1.38E+05 | 7.49E−04 | 4.89E−09 | 1.42E+05 | 6.92E−04 |
| Vk10 | 5.23E−09 | 1.34E+05 | 7.01E−04 | 4.43E−09 | 1.32E+05 | 5.85E−04 |
| Vk11 | 1.11E−08 | 1.17E+05 | 1.30E−03 | 8.47E−09 | 1.25E+05 | 1.06E−03 |
| Vk12 | 6.38E−09 | 1.26E+05 | 8.06E−04 | 7.01E−09 | 1.32E+05 | 9.25E−04 |
| Vk13 | 1.09E−06 | 3.53E+04 | 3.86E−02 | 3.64E−11 | 1.15E+05 | 4.19E−06 |
| Ab15 | 8.21E−09 | 1.24E+05 | 1.02E−03 | 7.88E−09 | 1.28E+05 | 1.01E−03 |
| Vk8 | 3.83E−08 | 5.03E+05 | 1.92E−02 | 8.56E−08 | 3.23E+05 | 2.76E−02 |
| Vh1 | 8.56E−09 | 1.17E+05 | 1.00E−03 | 4.01E−09 | 1.70E+05 | 6.82E−04 |
| Vh2 | 6.41E−09 | 1.21E+05 | 7.75E−04 | 2.84E−09 | 1.73E+05 | 4.92E−04 |

[0358] Ab15, Ab19, and Ab90 showed similar PK profiles with respect to their in vivo terminal half-life in vivo (FIG. 11, Table 8). Mice were injected into the tail vein with a single dose of the antibodies (at 5, 10, 20 or 40 mg/kg) and bled at predetermined time points over a 2-week period. Blood was processed to serum before being stored at −80C and analysis by ELISA.

TABLE 8
Pharmacokinetic profiles of pan-FGFR antibodies in mice

| | | |
|---|---|---|
| No. of | Avg. half life (h) | AUC |

| Molecule | animals | α-phase | β-phase | (μg/mL/h) |
|---|---|---|---|---|
| Ab15 | 4 | 3.85 | 239.02 | 428.56 |
| Ab19 | 4 | 2.24 | 113.63 | 332.34 |
| Ab90 | 4 | 0.36 | 147.48 | 286.07 |

Note:
AUC was calculated based on a biexponential fit of the data over 72 hours

[0359] Ab15, Ab19, and Ab90 were assessed with respect to their in vivo efficacy in a mesothelioma model, MFE280 (FIG. 12A). 5×10⁶ cells of the respective cell line were inoculated s.c. into nude mice using 50% GFR matrigel. Anti-FGFR antibodies were dosed Q1W at 8-10 mg/kg by i.p injection. Doses used for the individual antibodies were adjusted based on the PK studies and body weight and tumor volumes were assessed twice weekly. Ab15 was additionally tested in an endometrial xenograft model, MFE280 (FIG. 12B), a renal xenograft model, SN12C (FIG. 12C).

[0360] In all models, Ab15 was highly efficacious in suppressing tumor growth in a dose-dependent manner. Ab15 was a non-responder in the mesothelioma model MSTO211H in vitro (FIG. 12D) but Ab15 potently inhibited growth in vivo (FIG. 12A). This suggests that Ab15 not only acts as an anti-proliferative agent, but also as an anti-angiogenic agent.

TABLE 9
SUMMARY OF SEQUENCES

| SEQ | | |
|---|---|---|
| ID | Description | SEQUENCE |
| 1 | FGFR1 IIIc | TDNTKPNPVAPYWTSPEKMEKKLHAVPAAKTVKFKCPSSGTPNPTLRWLKNGKEFKPDH |
| | (human) | RIGGYKVRYATWSIIMDSVVPSDKGNYTCIVENEYGSINHTYQLDVVERSPHRPILQAG |
| | NM_001174066.1 | LPANKTVALGSNVEFMCKVYSDPQPHIQWLKHIEVNGSKIGPDNLPYVQILKTAGVNTT |
| | (mouse) | DKEMEVLHLRNVSFEDAGEYTCLAGNSIGLSHHSAWLTVLEALEERPAVMTSPLYLE |
| | XM_006509014.1, | **For all FGFR sequences (i.e., SEQ ID NOs: 1-22, the sequences |
| | NM_01079908.1, | provided correspond to extracellular fragments of the mature sequence |
| | XP_006509077.1 | after leader peptide cleavage |
| | (cynomolgus) | |
| | AB220417.1 | |
| | (RNA) | |
| 2 | FGFR1 IIIc | TDNTKPNPVAPYWTSPEKMEKKLHAVPAAKTVKFKCPSSGTPSPTLRWLKNGKEFKPDH |
| | (rat) | RIGGYKVRYATWSIIMDSVVPSDKGNYTCIVENEYGSINHTYQLDVVERSPHRPILQAG |
| | XP_006253388, | LPANKTVALGSNVEFMCKVYSDPQPHIQWLKHIEVNGSKIGPDNLPYVQILKTAGVNTT |
| | XM_006253328.1 | DKEMEVLHLRNVSFEDAGEYTCLAGNSIGLSHHSAWLTVLEALEERPAVMTSPLYLE |
| 3 | FGFR1 IIIb | TDNTKPNPVAPYWTSPEKMEKKLHAVPAAKTVKFKCPSSGTPNPTLRWLKNGKEFKPDH |
| | (human) | RIGGYKVRYATWSIIMDSVVPSDKGNYTCIVENEYGSINHTYQLDVVERSPHRPILQAG |
| | FJ809917.1 | LPANKTVALGSNVEFMCKVYSDPQPHIQWLKHIEVNGSKIGPDNLPYVQILKHSGINSS |
| | (mouse) | DAEVLTLFNVTEAQSGEYVCKVSNYIGEANQSAWLTVTRPVAKALEERPAVMTSPLYLE |
| | AF176552.1, | |
| | AF176552.1, | |
| | NW_001030892.1 | |
| | (cynomolgus) | |
| | NW_005092974.1 | |
| 4 | FGFR1 IIIb | TDNTKPNPVAPYWTSPEKMEKKLHAVPAAKTVKFKCPSSGTPSPTLRWLKNGKEFKPDH |
| | (rat) | RIGGYKVRYATWSIIMDSVVPSDKGNYTCIVENEYGSINHTYQLDVVERSPHRPILQAG |
| | AC_000084.1 | LPANKTVALGSNVEFMCKVYSDPQPHIQWLKHIEVNGSKIGPDNLPYVQILKHSGINSS |
| | | DAEVLTLFNVTEAQSGEYVCKVSNYIGEANQSAWLTVTRPVPKALEERPAVMTSPLYLE |
| 5 | FGFR2 IIIc | SNNKRAPYWTNTEKMEKRLHAVPAANTVKFRCPAGGNPMPTMRWLKNGKEFKQEHRIGG |
| | (human) | YKVRNQHWSLIMESVVPSDKGNYTCVVENEYGSINHTYHLDVVERSPHRPILQAGLPAN |
| | XM_006717713.1 | ASTVVGGDVEFVCKVYSDAQPHIQWIKHVEKNGSKYGPDGLPYLKVLKAAGVNTTDKEI |
| | | EVLYIRNVTFEDAGEYTCLAGNSIGISFHSAWLTVLPAPGREKEITASPDYLE |
| 6 | FGFR2 IIIc | RSNQRAPYWTNTEKMEKRLHAVPAANTVKFRCPAGGNPTPTMRWLKNGKEFKQEHRIGG |
| | (mouse) | YKVRNQHWSLIMESVVPSDKGNYTCLVENEYGSINHTYHLDVVERSPHRPILQAGLPAN |
| | XM_06507355.1 | ASTVVGGDVEFVCKVYSDAQPHIQWIKHVEKNGSKYGPDGLPYLKVLKAAGVNTTDKEI |
| | (rat) | EVLYIRNVTFEDAGEYTCLAGNSIGISFHSAWLTVLPAPVREKEITASPDYLE |
| | NM_001109894.1 | |
| 7 | FGFR2 IIIc | GNNKRAPYWTNTEKMEKRLHAVPAANTVKFRCPAGGNPTPTMRWLKNGKEFKQEHRIGG |
| | (cynomolgus) | YKVRNQHWSLIMESVVPSDKGNYTCVVENEYGSINHTYHLDVVERSPHRPILQAGLPAN |
| | XM_005566598.1 | ASTVVGGDVEFVCKVYSDAQPHIQWIKHVEKNGSKYGPDGLPYLKVLKAAGVNTTDKEI |
| | | EVLYIRNVTFEDAGEYTCLAGNSIGISFHSAWLTVLPAPGREKEITASPDYLE |
| 8 | FGFR2 IIIb | SNNKRAPYWTNTEKMEKRLHAVPAANTVKFRCPAGGNPMPTMRWLKNGKEFKQEHRIGG |
| | (human) | YKVRNQHWSLIMESVVPSDKGNYTCVVENEYGSINHTYHLDVVERSPHRPILQAGLPAN |
| | X56191.1 | ASTVVGGDVEFVCKVYSDAQPHIQWIKHVEKNGSKYGPDGLPYLKVLKHSGINSSNAEV |
| | | LALFNVTEADAGEYICKVSNYIGQANQSAWLTVLPKQQAPGREKEITASPDYLE |
| 9 | FGFR2 IIIb | RSNQRAPYWTNTEKMEKRLHAVPAANTVKFRCPAGGNPTPTMRWLKNGKEFKQEHRIGG |
| | (mouse) | YKVRNQHWSLIMESVVPSDKGNYTCLVENEYGSINHTYHLDVVERSPHRPILQAGLPAN |
| | XM_006507356.1, | ASTVVGGDVEFVCKVYSDAQPHIQWIKHVEKNGSKYGPDGLPYLKVLKHSGINSSNAEV |
| | M63503.1 | LALFNVTEMDAGEYICKVSNYIGQANQSAWLTVLPKQQAPVREKEITASPDYLE |
| | (rat) | |
| | XM_006230392.1 | |
| 10 | FGFR2 IIIb | GNNKRAPYWTNTEKMEKRLHAVPAANTVKFRCPAGGNPTPTMRWLKNGKEFKQEHRIGG |
| | (cynomolgus) | YKVRNQHWSLIMESVVPSDKGNYTCVVENEYGSINHTYHLDVVERSPHRPILQAGLPAN |
| | XM_005566597.1 | ASTVVGGDVEFVCKVYSDAQPHIQWIKHVEKNGSKYGPDGLPYLKVLKHSGINSSNAEV |
| | | LALFNVTEADAGEYICKVSNYIGQANQSAWLTVLPKQQAPGREKEITASPDYLE |
| 11 | FGFR3 IIIc | AEDTGVDTGAPYWTRPERMDKKLLAVPAANTVRFRCPAAGNPTPSISWLKNGREFRGEH |
| | (human) | RIGGIKLRHQQWSLVMESVVPSDRGNYTCVVENKFGSIRQTYTLDVLERSPHRPILQAG |
| | XM_06713872.1, | LPANQTAVLGSDVEFHCKVYSDAQPHIQWLKHVEVNGSKVGPDGTPYVTVLKTAGANTT |
| | M58051.1 | DKELEVLSLHNVTFEDAGEYTCLAGNSIGFSHHSAWLVVLPAEEELVEADEAGSV |
| 12 | FGFR3 IIIc | GEDVAEDTGAPYWTRPERMDKKLLAVPAANTVRFRCPAAGNPTPSISWLKNGKEFRGEH |
| | (mouse) | RIGGIKLRHQQWSLVMESVVPSDRGNYTCVVENKFGSIRQTYTLDVLERSPHRPILQAG |
| | NM_001205270.1 | LPANQTAILGSDVEFHCKVYSDAQPHIQWLKHVEVNGSKVGPDGTPYVTVLKTAGANTT |
| | | DKELEVLSLHNVTFEDAGEYTCLAGNSIGFSHHSAWLVVLPAEEELMETDEAGSV |
| 13 | FGFR3 IIIc | GEDVAEDTGAPYWTRPERMDKKLLAVPAANTVRFRCPAAGNPTPSISWLKNGKEFRGEH |
| | (rat) | RIGGIKLRHQQWSLVMESVVPSDRGNYTCVVENKFGSIRQTYTLDVLERSPHRPILQAG |
| | XM_006251394.1 | LPANQTAVLGSDVEFHCKVYSDAQPHIQWLKHVEVNGSKVGPDGTPYVTVLKTAGANTT |
| | | DRELEVLSLHNVTFEDAGEYTCLAGNSIGFSHHSAWLVVLPAEEELMEVDEAGSV |
| 14 | FGFR3 IIIc | AEDTGVDTGAPYWTRPERMDKKLLAVPAANTVRFRCPAAGNPTPSISWLKNGKEFRGEH |
| | (cynomolgus) | RIGGIKLRHQQWSLVMESVVPSDRGNYTCVVENKFGSIRQTYTLDVLERSPHRPILQAG |
| | XM_005554287.1 | LPANQTAVLGSDVEFHCKVYSDAQPHIQWLKHVEVNGSKVGPDGTPYVTVLKTAGANTT |
| | | DKELEVLSLHNVTFEDAGEYTCLAGNSIGFSHHSAWLVVLPAEEELVEADEAGSV |
| 15 | FGFR3 IIIb | AEDTGVDTGAPYWTRPERMDKKLLAVPAANTVRFRCPAAGNPTPSISWLKNGREFRGEH |
| | (human) | RIGGIKLRHQQWSLVMESVVPSDRGNYTCVVENKFGSIRQTYTLDVLERSPHRPILQAG |
| | NM_001163213.1, | LPANQTAVLGSDVEFHCKVYSDAQPHIQWLKHVEVNGSKVGPDGTPYVTVLKSWISESV |
| | XM_006713869.1 | EADVRLRLANVSERDGGEYLCRATNFIGVAEKAFWLSVHGPRAAEEELVEADEAGSV |
| 16 | FGFR3 IIIb | GEDVAEDTGAPYWTRPERMDKKLLAVPAANTVRFRCPAAGNPTPSISWLKNGKEFRGEH |
| | (mouse) | RIGGIKLRHQQWSLVMESVVPSDRGNYTCVVENKFGSIRQTYTLDVLERSPHRPILQAG |
| | NM_001163217.2 | LPANQTAILGSDVEFHCKVYSDAQPHIQWLKHVEVNGSKVGPDGTPYVTVLKSWISENV |
| | | EADARLRLANVSERDGGEYLCRATNFIGVAEKAFWLRVHGPQAAEEELMETDEAGSV |
| 17 | FGFR3 IIIb | GEDVAEDTGAPYWTRPERMDKKLLAVPAANTVRFRCPAAGNPTPSISWLKNGKEFRGEH |
| | (rat) | RIGGIKLRHQQWSLVMESVVPSDRGNYTCVVENKFGSIRQTYTLDVLERSPHRPILQAG |
| | XM_006251392.1 | LPANQTAVLGSDVEFHCKVYSDAQPHIQWLKHVEVNGSKVGPDGTPYVTVLKSWISENV |
| | | EADARLRLANVSERDGGEYLCRATNFIGVAEKAFWLRVHGPQAAEEELMEVDEAGSV |
| 18 | FGFR3 IIIb | AEDTGVDTGAPYWTRPERMDKKLLAVPAANTVRFRCPAAGNPTPSISWLKNGKEFRGEH |
| | (cynomolgus) | RIGGIKLRHQQWSLVMESVVPSDRGNYTCVVENKFGSIRQTYTLDVLERSPHRPILQAG |
| | XM_005554285.1 | LPANQTAVLGSDVEFHCKVYSDAQPHIQWLKHVEVNGSKVGPDGTPYVTVLKSWISESV |
| | | EADVRLRLANVSERDGGEYLCRATNFIGVAEKAFWLSVHRPRAAEEELVEADEAGSV |
| 19 | FGFR4 | QQAPYWTHPQRMEKKLHAVPAGNTVKFRCPAAGNPTPTIRWLKDGQAFHGENRIGGIRL |
| | (human) | RHQHWSLVMESVVPSDRGTYTCLVENAVGSIRYNYLLDVLERSPHRPILQAGLPANTTA |
| | JN007482.1, | VVGSDVELLCKVYSDAQPHIQWLKHIVINGSSFGADGFPYVQVLKTADINSSEVEVLYL |
| | XR_427801.1 | RNVSAEDAGEYTCLAGNSIGLSYQSAWLTVLPEEDPTWTAAAPEARYTD |
| 20 | FGFR4 | QQAPYWTHPQRMEKKLHAVPAGNTVKFRCPAAGNPMPTIHWLKDGQAFHGENRIGGIRL |
| | (mouse) | RHQHWSLVMESVVPSDRGTYTCLVENSLGSIRYSYLLDVLERSPHRPILQAGLPANTTA |
| | AY493377.2, | VVGSDVELLCKVYSDAQPHIQWLKHVVINGSSFGADGFPYVQVLKTTDINSSEVEVLYL |
| | NM_008011.2, | RNVSAEDAGEYTCLAGNSIGLSYQSAWLTVLPEEDLTWTTATPEARYTD |
| | XM_006517099.1 | |
| 21 | FGFR4 | QQAPYWTHPQRMEKKLHAVPAGNTVKFRCPAAGNPMPTIHWLKNGQAFHGENRIGGIRL |
| | (rat) | RHQHWSLVMESVVPSDRGTYTCLVENSLGSIRYSYLLDVLERSPHRPILQAGLPANTTA |
| | NM_001109904.1, | VVGSNVELLCKVYSDAQPHIQWLKHIVINGSSFGADGFPYVQVLKTTDINSSEVEVLYL |
| | BC100260, | RNVSAEDAGEYTCLAGNSIGLSYQSAWLTVLPAEEEDLAWTTATSEARYTD |
| | XM_006253605.1 | |
| 22 | FGFR4 | QQAPYWTHPQRMEKKLHAVPAGNTVKFRCPAAGNPTPTIRWLKDGQAFHGENRIGGIRL |
| | (cynomolgus) | RHQHWSLVMESVVPSDRGTYTCLVENAVGSIRYNYLLDVLERSPHRPILQAGLPANTTA |
| | XM_005558623.1 | VVGSDVELLCKVYSDAQPHIQWLKHIVINGSSFGADGFPYVQVLKTADINSSEVEVLYL |
| | | RNVSAEDAGEYTCLAGNSIGLSYQSAWLTVLPEEDLTWTAATPEARYTD |
| 23 | VHCDR1 Ab1 | SYAMH |
| 24 | VHCDR2 Ab1 | VISYDGSNKYYADSVKG |
| 25 | VHCDR3 Ab1 | GAGRGYTYGPDGFDI |
| 26 | VLCDR1 Ab1 | RSSQSLVYTDGITYLS |
| 27 | VLCDR2 Ab1 | EISNRFS |
| 28 | VLCDR3 Ab1 | MQATQFPWT |
| 29 | VH Ab1 | EVQLVESGGGLVQPGGSMKLSCVASGFTFSSYAMHWVRQAPGKGLEWVAVISYDGSNKY |
| | (referred to as | YADSVKGRFTISRDNAKNTLYLQMNSLRAEDTATYYCVRGAGRGYTYGPDGFDIWGQGT |
| | FGF#41 in FIG. | MVTVSS |
| | 2) | |
| 30 | VL Ab1 | DIVMTQSPRSLPVTLGQPASISCRSSQSLVYTDGITYLSWLQQRPGQPPRLLIYEISNR |
| | | FSGVPDRFSGSGAGTDFTLKISRVEAEDVGVYYCMQATQFPWTFGQGTKVDIK |
| 31 | VHVL Ab1 | EVQLVESGGGLVQPGGSMKLSCVASGFTFSSYAMHWVRQAPGKGLEWVAVISYDGSNKY |
| | (scFv) | YADSVKGRFTISRDNAKNTLYLQMNSLRAEDTATYYCVRGAGRGYTYGPDGFDIWGQGT |
| | | MVTVSSASTGGGGSGGGGGSDIVMTQSPRSLPVTLGQPASISCRSSQSLVYTDGITYLS |
| | | WLQQRPGQPPRLLIYEISNRFSGVPDRFSGSGAGTDFTLKISRVEAEDVGVYYCMQATQ |
| | | FPWTFGQGTKVDIKRTVAAPSHHHHHH |
| 32 | HC Ab1 | EVQLVESGGGLVQPGGSMKLSCVASGFTFSSYAMHWVRQAPGKGLEWVAVISYDGSNKY |
| | | YADSVKGRFTISRDNAKNTLYLQMNSLRAEDTATYYCVRGAGRGYTYGPDGFDIWGQGT |
| | | MVTVSSKGPSVFPLAPSSRSTSESTAALGCLVKDYFPEPVTVSWNSGALTSGVHTFPAV |
| | | LQSSGLYSLSSVVTVPSSNFGTQTYTCNVDHKPSNTKVDKTVERKCCVECPPCPAPPVA |
| | | GPSVFLFPPKPKDTLMISRTPEVTCVVVDVSHEDPEVQFNWYVDGVEVHNAKTKPREEQ |
| | | FNSTFRVVSVLTVVHQDWLNGKEYKCKVSNKGLPAPIEKTISKTKGQPREPQVYTLPPS |
| | | REEMTKNQVSLTCLVKGFYPSDIAVEWESNGQPENNYKTTPPMLDSDGSFFLYSKLTVD |
| | | KSRWQQGNVFSCSVMHEALHNHYTQKSLSLSPG |
| 33 | LC Ab1 | DIVMTQSPRSLPVTLGQPASISCRSSQSLVYTDGITYLSWLQQRPGQPPRLLIYEISNR |
| | | FSGVPDRFSGSGAGTDFTLKISRVEAEDVGVYYCMQATQFPWTFGQGTKVDIKRTVAAP |
| | | SVFIFPPSDEQLKSGTASVVCLLNNFYPREAKVQWKVDNALQSGNSQESVTEQDSKDST |
| | | YSLSSTLTLSKADYEKHKVYACEVTHQGLSSPVTKSFNRGEC |
| 34 | VHCDR1 Ab2 | SYAMH |
| 35 | VHCDR2 Ab2 | LISYDGSNKYYADSVKG |
| 36 | VHCDR3 Ab2 | GAGRGYTYGPDGFDI |
| 37 | VLCDR1 Ab2 | RVSQSITNYLN |
| 38 | VLCDR2 Ab2 | AASSLQS |
| 39 | VLCDR3 Ab2 | QQSYTTPFT |
| 40 | VH Ab2 | EVQLLESGGGVVQPGRSLRLSCAASGFTFSSYAMHWVRQAPGKGLEWVALISYDGSNKY |
| | (referred to as | YADSVKGRFTISRDNSKNTLYLQMNSLRAEDTAIYYCVRGAGRGYTYGPDGFDIWGQGT |
| | FGF#59 in FIG. | MVTVSS |
| | 2) | |
| 41 | VL Ab2 | DIVMTQSPSSLSASVGDRVSITCRVSQSITNYLNWYQQKPGGAPKLLIYAASSLQSGVP |
| | | SRFSGSGSGSQFTLTISSLQAEDFATYYCQQSYTTPFTFGPGTKVEIK |
| 42 | VHVL Ab2 | EVQLLESGGGVVQPGRSLRLSCAASGFTFSSYAMHWVRQAPGKGLEWVALISYDGSNKY |
| | (scFv) | YADSVKGRFTISRDNSKNTLYLQMNSLRAEDTAIYYCVRGAGRGYTYGPDGFDIWGQGT |
| | | MVTVSSASTGGGGSGGGGSGGGGSGGGGSDIVMTQSPSSLSASVGDRVSITCRVSQSIT |
| | | NYLNWYQQKPGGAPKLLIYAASSLQSGVPSRFSGSGSGSQFTLTISSLQAEDFATYYCQ |
| | | QSYTTPFTFGPGTKVEIKRTVAAPSHHHHHH |
| 43 | HC Ab2 | EVQLLESGGGVVQPGRSLRLSCAASGFTFSSYAMHWVRQAPGKGLEWVALISYDGSNKY |
| | | YADSVKGRFTISRDNSKNTLYLQMNSLRAEDTAIYYCVRGAGRGYTYGPDGFDIWGQGT |
| | | MVTVSSKGPSVFPLAPSSRSTSESTAALGCLVKDYFPEPVTVSWNSGALTSGVHTFPAV |
| | | LQSSGLYSLSSVVTVPSSNFGTQTYTCNVDHKPSNTKVDKTVERKCCVECPPCPAPPVA |
| | | GPSVFLFPPKPKDTLMISRTPEVTCVVVDVSHEDPEVQFNWYVDGVEVHNAKTKPREEQ |
| | | FNSTFRVVSVLTVVHQDWLNGKEYKCKVSNKGLPAPIEKTISKTKGQPREPQVYTLPPS |
| | | REEMTKNQVSLTCLVKGFYPSDIAVEWESNGQPENNYKTTPPMLDSDGSFFLYSKLTVD |
| | | KSRWQQGNVFSCSVMHEALHNHYTQKSLSLSPG |
| 44 | LC Ab2 | DIVMTQSPSSLSASVGDRVSITCRVSQSITNYLNWYQQKPGGAPKLLIYAASSLQSGVP |
| | | SRFSGSGSGSQFTLTISSLQAEDFATYYCQQSYTTPFTFGPGTKVEIKRTVAAPSVFIF |
| | | PPSDEQLKSGTASVVCLLNNFYPREAKVQWKVDNALQSGNSQESVTEQDSKDSTYSLSS |
| | | TLTLSKADYEKHKVYACEVTHQGLSSPVTKSFNRGEC |
| 45 | VHCDR1 Ab3 | QYSMH |
| 46 | VHCDR2 Ab3 | LISFDGADKYYADSVKG |
| 47 | VHCDR3 Ab3 | GAGRGYTYGPDGFDI |
| 48 | VLCDR1 Ab3 | RTSQTISRYLN |
| 49 | VLCDR2 Ab3 | TATSLQS |
| 50 | VLCDR3 Ab3 | QQTYSAPLT |
| 51 | VH Ab3 | EVQLVESGGGVVQPGRSLRLSCAASGFTFSQYSMHWVRQSPGKGLEWVTLISFDGADKY |
| | (referred to as | YADSVKGRFTISRDNSNDTLFLHMNGLRVEDTAIYYCVRGAGRGYTYGPDGFDIWGQGT |
| | FGF#78 in FIG. | MVTVSS |
| | 2) | |
| 52 | VL Ab3 | DIQLTQSPSSLSASVGDRVTITCRTSQTISRYLNWYQQQPGKAPKLLIYTATSLQSGVP |
| | | SRFSGSGSGTDFTLTIGGLQPEDFAIYFCQQTYSAPLTFGGGTKVEIK |
| 53 | VHVL Ab3 | EVQLVESGGGVVQPGRSLRLSCAASGFTFSQYSMHWVRQSPGKGLEWVTLISFDGADKY |
| | (scFv) | YADSVKGRFTISRDNSNDTLFLHMNGLRVEDTAIYYCVRGAGRGYTYGPDGFDIWGQGT |
| | | MVTVSSASTGGGGSGGGGSGGGGSGGGGSDIQLTQSPSSLSASVGDRVTITCRTSQTIS |
| | | RYLNWYQQQPGKAPKLLIYTATSLQSGVPSRFSGSGSGTDFTLTIGGLQPEDFAIYFCQ |
| | | QTYSAPLTFGGGTKVEIKRTVAAPSHHHHHH |
| 54 | HC Ab3 | EVQLVESGGGVVQPGRSLRLSCAASGFTFSQYSMHWVRQSPGKGLEWVTLISFDGADKY |
| | | YADSVKGRFTISRDNSNDTLFLHMNGLRVEDTAIYYCVRGAGRGYTYGPDGFDIWGQGT |
| | | MVTVSSKGPSVFPLAPSSRSTSESTAALGCLVKDYFPEPVTVSWNSGALTSGVHTFPAV |
| | | LQSSGLYSLSSVVTVPSSNFGTQTYTCNVDHKPSNTKVDKTVERKCCVECPPCPAPPVA |
| | | GPSVFLFPPKPKDTLMISRTPEVTCVVVDVSHEDPEVQFNWYVDGVEVHNAKTKPREEQ |
| | | FNSTFRVVSVLTVVHQDWLNGKEYKCKVSNKGLPAPIEKTISKTKGQPREPQVYTLPPS |
| | | REEMTKNQVSLTCLVKGFYPSDIAVEWESNGQPENNYKTTPPMLDSDGSFFLYSKLTVD |
| | | KSRWQQGNVFSCSVMHEALHNHYTQKSLSLSPG |
| 55 | LC Ab3 | DIQLTQSPSSLSASVGDRVTITCRTSQTISRYLNWYQQQPGKAPKLLIYTATSLQSGVP |
| | | SRFSGSGSGTDFTLTIGGLQPEDFAIYFCQQTYSAPLTFGGGTKVEIKRTVAAPSVFIF |
| | | PPSDEQLKSGTASVVCLLNNFYPREAKVQWKVDNALQSGNSQESVTEQDSKDSTYSLSS |
| | | TLTLSKADYEKHKVYACEVTHQGLSSPVTKSFNRGEC |
| 56 | VHCDR1 Ab4 | SYAMH |
| 57 | VHCDR2 Ab4 | LISYDGSNKYYADSVKG |
| 58 | VHCDR3 Ab4 | GAGRGYTYGPDGFDI |
| 59 | VLCDR1 Ab4 | KSSQSLIFGDGKTYLY |
| 60 | VLCDR2 Ab4 | QVSNRFS |
| 61 | VLCDR3 Ab4 | MQAKQFPWT |
| 62 | VH Ab4 | EVQLLESGGGVVQPGRSLRLSCAASGFTFSSYAMHWVRQAPGKGLEWVALISYDGSNKY |
| | (referred to as | YADSVKGRFTISRDNSKNTLYLQMNSLRAEDTAIYYCVRGAGRGYTYGPDGFDIWGQGT |
| | FGF#10 in FIG. | MVTVSS |
| | 2) | |
| 63 | VL Ab4 | DIVMTQTPLSLSVTPGQPASIFCKSSQSLIFGDGKTYLYWYLQKPGQPPRLLIYQVSNR |
| | | FSGVPDRFSGSGAGTDFTLKISRVEAEDVGVYYCMQAKQFPWTFGQGTKLEIK |
| 64 | VHVL Ab4 | EVQLLESGGGVVQPGRSLRLSCAASGFTFSSYAMHWVRQAPGKGLEWVALISYDGSNKY |
| | (scFv) | YADSVKGRFTISRDNSKNTLYLQMNSLRAEDTAIYYCVRGAGRGYTYGPDGFDIWGQGT |
| | | MVTVSSASTGGGSGGGGSDIVMTQTPLSLSVTPGQPASIFCKSSQSLIFGDGKTYLYWY |
| | | LQKPGQPPRLLIYQVSNRFSGVPDRFSGSGAGTDFTLKISRVEAEDVGVYYCMQAKQFP |
| | | WTFGQGTKLEIKRTVAAPSHHHHHH |
| 65 | HC Ab4 | EVQLLESGGGVVQPGRSLRLSCAASGFTFSSYAMHWVRQAPGKGLEWVALISYDGSNKY |
| | | YADSVKGRFTISRDNSKNTLYLQMNSLRAEDTAIYYCVRGAGRGYTYGPDGFDIWGQGT |
| | | MVTVSSKGPSVFPLAPSSRSTSESTAALGCLVKDYFPEPVTVSWNSGALTSGVHTFPAV |
| | | LQSSGLYSLSSVVTVPSSNFGTQTYTCNVDHKPSNTKVDKTVERKCCVECPPCPAPPVA |
| | | GPSVFLFPPKPKDTLMISRTPEVTCVVVDVSHEDPEVQFNWYVDGVEVHNAKTKPREEQ |
| | | FNSTFRVVSVLTVVHQDWLNGKEYKCKVSNKGLPAPIEKTISKTKGQPREPQVYTLPPS |
| | | REEMTKNQVSLTCLVKGFYPSDIAVEWESNGQPENNYKTTPPMLDSDGSFFLYSKLTVD |
| | | KSRWQQGNVFSCSVMHEALHNHYTQKSLSLSPG |
| 66 | LC Ab4 | DIVMTQTPLSLSVTPGQPASIFCKSSQSLIFGDGKTYLYWYLQKPGQPPRLLIYQVSNR |
| | | FSGVPDRFSGSGAGTDFTLKISRVEAEDVGVYYCMQAKQFPWTFGQGTKLEIKRTVAAP |
| | | SVFIFPPSDEQLKSGTASVVCLLNNFYPREAKVQWKVDNALQSGNSQESVTEQDSKDST |
| | | YSLSSTLTLSKADYEKHKVYACEVTHQGLSSPVTKSFNRGEC |
| 67 | VHCDR1 Ab5 | HYAMH |
| 68 | VHCDR2 Ab5 | VISYDGSNKYYADSVKG |
| 69 | VHCDR3 Ab5 | GAGRGYTYGPDGFDI |
| 70 | VLCDR1 Ab5 | KSSQSLLYSDGKTYLS |
| 71 | VLCDR2 Ab5 | EVSSRFS |
| 72 | VLCDR3 Ab5 | MQATRFPWT |
| 73 | VH Ab5 | QVQLVESGGDVVQPGRSLRLSCAASGFTFGHYAMHWVRQAPGQGLEWVTVISYDGSNKY |
| | | YADSVKGRFTISRDNSKNTVDLQMNSLRVEDTAIYYCVRGAGRGYTYGPDGFDIWGQGT |
| | | MVTVSS |
| 74 | VL Ab5 | EIVMTQTPLSLSVTPGQPASISCKSSQSLLYSDGKTYLSWYLQKPGQSPQLLIYEVSSR |
| | | FSGVPDRFSGSGAGTDFTLKISRVEAXDVGVYYCMQATRFPWTFGQGTKVEIK |
| 75 | VHVL Ab5 | QVQLVESGGDVVQPGRSLRLSCAASGFTFGHYAMHWVRQAPGQGLEWVTVISYDGSNKY |
| | (scFv) | YADSVKGRFTISRDNSKNTVDLQMNSLRVEDTAIYYCVRGAGRGYTYGPDGFDIWGQGT |
| | | MVTVSSASTGGGGSGGGGSGGGGSGGGGSEIVMTQTPLSLSVTPGQPASISCKSSQSLL |
| | | YSDGKTYLSWYLQKPGQSPQLLIYEVSSRFSGVPDRFSGSGAGTDFTLKISRVEAXDVG |
| | | VYYCMQATRFPWTFGQGTKVEIKRTVAAPSHHHHHH |
| 76 | HC Ab5 | QVQLVESGGDVVQPGRSLRLSCAASGFTFGHYAMHWVRQAPGQGLEWVTVISYDGSNKY |
| | | YADSVKGRFTISRDNSKNTVDLQMNSLRVEDTAIYYCVRGAGRGYTYGPDGFDIWGQGT |
| | | MVTVSSKGPSVFPLAPSSRSTSESTAALGCLVKDYFPEPVTVSWNSGALTSGVHTFPAV |
| | | LQSSGLYSLSSVVTVPSSNFGTQTYTCNVDHKPSNTKVDKTVERKCCVECPPCPAPPVA |
| | | GPSVFLFPPKPKDTLMISRTPEVTCVVVDVSHEDPEVQFNWYVDGVEVHNAKTKPREEQ |
| | | FNSTFRVVSVLTVVHQDWLNGKEYKCKVSNKGLPAPIEKTISKTKGQPREPQVYTLPPS |
| | | REEMTKNQVSLTCLVKGFYPSDIAVEWESNGQPENNYKTTPPMLDSDGSFFLYSKLTVD |
| | | KSRWQQGNVFSCSVMHEALHNHYTQKSLSLSPG |
| 77 | LC Ab5 | EIVMTQTPLSLSVTPGQPASISCKSSQSLLYSDGKTYLSWYLQKPGQSPQLLIYEVSSR |
| | | FSGVPDRFSGSGAGTDFTLKISRVEAXDVGVYYCMQATRFPWTFGQGTKVEIKRTVAAP |
| | | SVFIFPPSDEQLKSGTASVVCLLNNFYPREAKVQWKVDNALQSGNSQESVTEQDSKDST |
| | | YSLSSTLTLSKADYEKHKVYACEVTHQGLSSPVTKSFNRGEC |
| 78 | VHCDR1 Ab6 | SYAMH |
| 79 | VHCDR2 Ab6 | VISYDGSNKYYADSVKG |
| 80 | VHCDR3 Ab6 | GAGRGYTYGPDGFDI |
| 81 | VLCDR1 Ab6 | RSSQSLVYTDGITYLS |
| 82 | VLCDR2 Ab6 | EISNRFS |
| 83 | VLCDR3 Ab6 | MQATQFPWT |
| 84 | VH Ab6 | EVQLQESGGGLVQPGGSMKLSCVASGFTFSSYAMHWVRQAPGKGLEWVAVISYDGSNKY |
| | (referred to as | YADSVKGRFTISRDNAKNTLYLQMNSLRAEDTATYYCVRGAGRGYTYGPDGFDIWGQGT |
| | FGF#6 in FIG. 2) | MVTVSS |
| 85 | VL Ab6 | DIVMTQSPRSLPVTLGQPASISCRSSQSLVYTDGITYLSWLQQRPGQPPRLLIYEISNR |
| | | FSGVPDRFSGSGAGTDFTLKISRVEAEDVGVYYCMQATQFPWTFGQGTKVDIK |
| 86 | VHVL Ab6 | EVQLQESGGGLVQPGGSMKLSCVASGFTFSSYAMHWVRQAPGKGLEWVAVISYDGSNKY |
| | (scFv) | YADSVKGRFTISRDNAKNTLYLQMNSLRAEDTATYYCVRGAGRGYTYGPDGFDIWGQGT |
| | | MVTVSSASTGGGGSGGGGGSDIVMTQSPRSLPVTLGQPASISCRSSQSLVYTDGITYLS |
| | | WLQQRPGQPPRLLIYEISNRFSGVPDRFSGSGAGTDFTLKISRVEAEDVGVYYCMQATQ |
| | | FPWTFGQGTKVDIKRTVAAPSHHHHHH |
| 87 | HC Ab6 | EVQLQESGGGLVQPGGSMKLSCVASGFTFSSYAMHWVRQAPGKGLEWVAVISYDGSNKY |
| | | YADSVKGRFTISRDNAKNTLYLQMNSLRAEDTATYYCVRGAGRGYTYGPDGFDIWGQGT |
| | | MVTVSSKGPSVFPLAPSSRSTSESTAALGCLVKDYFPEPVTVSWNSGALTSGVHTFPAV |
| | | LQSSGLYSLSSVVTVPSSNFGTQTYTCNVDHKPSNTKVDKTVERKCCVECPPCPAPPVA |
| | | GPSVFLFPPKPKDTLMISRTPEVTCVVVDVSHEDPEVQFNWYVDGVEVHNAKTKPREEQ |
| | | FNSTFRVVSVLTVVHQDWLNGKEYKCKVSNKGLPAPIEKTISKTKGQPREPQVYTLPPS |
| | | REEMTKNQVSLTCLVKGFYPSDIAVEWESNGQPENNYKTTPPMLDSDGSFFLYSKLTVD |
| | | KSRWQQGNVFSCSVMHEALHNHYTQKSLSLSPG |
| 88 | LC Ab6 | DIVMTQSPRSLPVTLGQPASISCRSSQSLVYTDGITYLSWLQQRPGQPPRLLIYEISNR |
| | | FSGVPDRFSGSGAGTDFTLKISRVEAEDVGVYYCMQATQFPWTFGQGTKVDIKRTVAAP |
| | | SVFIFPPSDEQLKSGTASVVCLLNNFYPREAKVQWKVDNALQSGNSQESVTEQDSKDST |
| | | YSLSSTLTLSKADYEKHKVYACEVTHQGLSSPVTKSFNRGEC |
| 89 | VHCDR1 Ab7 | GYAIH |
| 90 | VHCDR2 Ab7 | LISYDGSNKYYADSAKG |
| 91 | VHCDR3 Ab7 | GAGRGYTYGPDGFDI |
| 92 | VLCDR1 Ab7 | RSSESLVYRDGNTYLS |
| 93 | VLCDR2 Ab7 | KVSNRFS |
| 94 | VLCDR3 Ab7 | MQATQFPWT |
| 95 | VH Ab7 | QVQLVESGGGVVQPGRSLRLSCAASGFTFSGYAIHWVRQAPGKGLEWVALISYDGSNKY |
| | (referred to as | YADSAKGRFTISRDNSKNTLSLQMNSLRVEDTAIYYCVRGAGRGYTYGPDGFDIWGQGT |
| | FGF#51 in FIG. | MVTVSS |
| | 2) | |
| 96 | VL Ab7 | DIVMTQTPLSSPVTLGQPASISCRSSESLVYRDGNTYLSWLHQRPGQSPRLLIYKVSNR |
| | | FSGVPDRFSGSGAGTDFTLKISRVEAEDVGVYFCMQATQFPWTFGQGTKVEIK |
| 97 | VHVL Ab7 | QVQLVESGGGVVQPGRSLRLSCAASGFTFSGYAIHWVRQAPGKGLEWVALISYDGSNKY |
| | (scFv) | YADSAKGRFTISRDNSKNTLSLQMNSLRVEDTAIYYCVRGAGRGYTYGPDGFDIWGQGT |
| | | MVTVSSASTGGGGSGGGGSGGGGSGGGGSDIVMTQTPLSSPVTLGQPASISCRSSESLV |
| | | YRDGNTYLSWLHQRPGQSPRLLIYKVSNRFSGVPDRFSGSGAGTDFTLKISRVEAEDVG |
| | | VYFCMQATQFPWTFGQGTKVEIKRTVAAPSHHHHHH |
| 98 | HC Ab7 | QVQLVESGGGVVQPGRSLRLSCAASGFTFSGYAIHWVRQAPGKGLEWVALISYDGSNKY |
| | | YADSAKGRFTISRDNSKNTLSLQMNSLRVEDTAIYYCVRGAGRGYTYGPDGFDIWGQGT |
| | | MVTVSSKGPSVFPLAPSSRSTSESTAALGCLVKDYFPEPVTVSWNSGALTSGVHTFPAV |
| | | LQSSGLYSLSSVVTVPSSNFGTQTYTCNVDHKPSNTKVDKTVERKCCVECPPCPAPPVA |
| | | GPSVFLFPPKPKDTLMISRTPEVTCVVVDVSHEDPEVQFNWYVDGVEVHNAKTKPREEQ |
| | | FNSTFRVVSVLTVVHQDWLNGKEYKCKVSNKGLPAPIEKTISKTKGQPREPQVYTLPPS |
| | | REEMTKNQVSLTCLVKGFYPSDIAVEWESNGQPENNYKTTPPMLDSDGSFFLYSKLTVD |
| | | KSRWQQGNVFSCSVMHEALHNHYTQKSLSLSPG |
| 99 | LC Ab7 | DIVMTQTPLSSPVTLGQPASISCRSSESLVYRDGNTYLSWLHQRPGQSPRLLIYKVSNR |
| | | FSGVPDRFSGSGAGTDFTLKISRVEAEDVGVYFCMQATQFPWTFGQGTKVEIKRTVAAP |
| | | SVFIFPPSDEQLKSGTASVVCLLNNFYPREAKVQWKVDNALQSGNSQESVTEQDSKDST |
| | | YSLSSTLTLSKADYEKHKVYACEVTHQGLSSPVTKSFNRGEC |
| 100 | VHCDR1 Ab8 | SYAMH |
| 101 | VHCDR2 Ab8 | VISYDGSNKYYADSVKG |
| 102 | VHCDR3 Ab8 | GAGRGYTYGPDGFDI |
| 103 | VLCDR1 Ab8 | RSSQSLVYSDGNTYLN |
| 104 | VLCDR2 Ab8 | KVSNRFS |
| 105 | VLCDR3 Ab8 | MQATRFPWT |
| 106 | VH Ab8 | EVQLVESGGGVVQPGRSLRLSCAASGFTFSSYAMHWVRQAPGKGLEWVAVISYDGSNKY |
| | (referred to as | YADSVKGRFTISRDNSKNTLSLQMNSLRVEDTAIYYCVRGAGRGYTYGPDGFDIWGQGT |
| | FGF#60 in FIG. | MVTVSS |
| | 2) | |
| 107 | VL Ab8 | EIVMTQTPLSSPVTLGQPASISCRSSQSLVYSDGNTYLNWLQQRPGQPPRLLIYKVSNR |
| | | FSGVPDRFSGSGAGTDFTLKISRVEAEDVGVYYCMQATRFPWTFGQGTKVEIK |
| 108 | VHVL Ab8 | EVQLVESGGGVVQPGRSLRLSCAASGFTFSSYAMHWVRQAPGKGLEWVAVISYDGSNKY |
| | (scFv) | YADSVKGRFTISRDNSKNTLSLQMNSLRVEDTAIYYCVRGAGRGYTYGPDGFDIWGQGT |
| | | MVTVSSASTGGGGSGGGGSGGGGSGGGGSEIVMTQTPLSSPVTLGQPASISCRSSQSLV |
| | | YSDGNTYLNWLQQRPGQPPRLLIYKVSNRFSGVPDRFSGSGAGTDFTLKISRVEAEDVG |
| | | VYYCMQATRFPWTFGQGTKVEIKRTVAAPSHHHHHH |
| 109 | HC Ab8 | EVQLVESGGGVVQPGRSLRLSCAASGFTFSSYAMHWVRQAPGKGLEWVAVISYDGSNKY |
| | | YADSVKGRFTISRDNSKNTLSLQMNSLRVEDTAIYYCVRGAGRGYTYGPDGFDIWGQGT |
| | | MVTVSSKGPSVFPLAPSSRSTSESTAALGCLVKDYFPEPVTVSWNSGALTSGVHTFPAV |
| | | LQSSGLYSLSSVVTVPSSNFGTQTYTCNVDHKPSNTKVDKTVERKCCVECPPCPAPPVA |
| | | GPSVFLFPPKPKDTLMISRTPEVTCVVVDVSHEDPEVQFNWYVDGVEVHNAKTKPREEQ |
| | | FNSTFRVVSVLTVVHQDWLNGKEYKCKVSNKGLPAPIEKTISKTKGQPREPQVYTLPPS |
| | | REEMTKNQVSLTCLVKGFYPSDIAVEWESNGQPENNYKTTPPMLDSDGSFFLYSKLTVD |
| | | KSRWQQGNVFSCSVMHEALHNHYTQKSLSLSPG |
| 110 | LC Ab8 | EIVMTQTPLSSPVTLGQPASISCRSSQSLVYSDGNTYLNWLQQRPGQPPRLLIYKVSNR |
| | | FSGVPDRFSGSGAGTDFTLKISRVEAEDVGVYYCMQATRFPWTFGQGTKVEIKRTVAAP |
| | | SVFIFPPSDEQLKSGTASVVCLLNNFYPREAKVQWKVDNALQSGNSQESVTEQDSKDST |
| | | YSLSSTLTLSKADYEKHKVYACEVTHQGLSSPVTKSFNRGEC |
| 111 | VHCDR1 Ab9 | THAMH |
| 112 | VHCDR2 Ab9 | LISYDGSEKYYADSVKG |
| 113 | VHCDR3 Ab9 | GAGRGYTYGPDGFDI |
| 114 | VLCDR1 Ab9 | KSSQSLLHSDGKTYLY |
| 115 | VLCDR2 Ab9 | EVSSRFS |
| 116 | VLCDR3 Ab9 | MQYINLPLT |
| 117 | VH Ab9 | QVQLLESGGXVXHPGXSLRLSCATSGFSFTTHAMHWVRQAPGKGLEWVALISYDGSEKY |
| | (referred to as | YADSVKGRFTISRDNSKNTLSLQMNSLRVEDTAIYYCVRGAGRGYTYGPDGFDIWGQGT |
| | FGF#63 in FIG. | MVTVSS |
| | 2) | |
| 118 | VL Ab9 | DIVMTQTPLSLSVTPGQPASISCKSSQSLLHSDGKTYLYWYLQKPGQSPQLLMYEVSSR |
| | | FSGVPDRFSGSGSGTDFTLKISRVEAEDVGVYYCMQYINLPLTFGGGTKLEIK |
| 119 | VHVL Ab9 | QVQLLESGGXVXHPGXSLRLSCATSGFSFTTHAMHWVRQAPGKGLEWVALISYDGSEKY |
| | (scFv) | YADSVKGRFTISRDNSKNTLSLQMNSLRVEDTAIYYCVRGAGRGYTYGPDGFDIWGQGT |
| | | MVTVSSASTGGGGSGGGGSGGGGSGGGGSDIVMTQTPLSLSVTPGQPASISCKSSQSLL |
| | | HSDGKTYLYWYLQKPGQSPQLLMYEVSSRFSGVPDRFSGSGSGTDFTLKISRVEAEDVG |
| | | VYYCMQYINLPLTFGGGTKLEIKRTVAAPSHHHHHH |
| 120 | HC Ab9 | QVQLLESGGXVXHPGXSLRLSCATSGFSFTTHAMHWVRQAPGKGLEWVALISYDGSEKY |
| | | YADSVKGRFTISRDNSKNTLSLQMNSLRVEDTAIYYCVRGAGRGYTYGPDGFDIWGQGT |
| | | MVTVSSKGPSVFPLAPSSRSTSESTAALGCLVKDYFPEPVTVSWNSGALTSGVHTFPAV |
| | | LQSSGLYSLSSVVTVPSSNFGTQTYTCNVDHKPSNTKVDKTVERKCCVECPPCPAPPVA |
| | | GPSVFLFPPKPKDTLMISRTPEVTCVVVDVSHEDPEVQFNWYVDGVEVHNAKTKPREEQ |
| | | FNSTFRVVSVLTVVHQDWLNGKEYKCKVSNKGLPAPIEKTISKTKGQPREPQVYTLPPS |
| | | REEMTKNQVSLTCLVKGFYPSDIAVEWESNGQPENNYKTTPPMLDSDGSFFLYSKLTVD |
| | | KSRWQQGNVFSCSVMHEALHNHYTQKSLSLSPG |
| 121 | LC Ab9 | DIVMTQTPLSLSVTPGQPASISCKSSQSLLHSDGKTYLYWYLQKPGQSPQLLMYEVSSR |
| | | FSGVPDRFSGSGSGTDFTLKISRVEAEDVGVYYCMQYINLPLTFGGGTKLEIKRTVAAP |
| | | SVFIFPPSDEQLKSGTASVVCLLNNFYPREAKVQWKVDNALQSGNSQESVTEQDSKDST |
| | | YSLSSTLTLSKADYEKHKVYACEVTHQGLSSPVTKSFNRGEC |
| 122 | VHCDR1 Ab10 | HYAMH |
| 123 | VHCDR2 Ab10 | VISYDGSNKYYADSVKG |
| 124 | VHCDR3 Ab10 | GAGRGYTYGPDGFDI |
| 125 | VLCDR1 Ab10 | RSSQSLVYSDGNTYLN |
| 126 | VLCDR2 Ab10 | KVSNRFS |
| 127 | VLCDR3 Ab10 | |
| 128 | VH Ab10 | QVQLVESGGDVVQPGRSLRLSCAASGFTFGHYAMHWVRQAPGQGLEWVTVISYDGSNKY |
| | (referred to as | YADSVKGRFTISRDNSKNTVDLQMNSLRVEDTAIYYCVRGAGRGYTYGPDGFDIWGQGT |
| | FGF#73 in FIG. | MVTVSS |
| | 2) | |
| 129 | VL Ab10 | EIVLTQTPLSSPVTLGQPASISCRSSQSLVYSDGNTYLNWLQQRPGQPPRLLIYKVSNR |
| | | FSGVPDRFSGSGAGTDFTLKISRVEAED |
| 130 | VHVL Ab10 | QVQLVESGGDVVQPGRSLRLSCAASGFTFGHYAMHWVRQAPGQGLEWVTVISYDGSNKY |
| | (scFv) | YADSVKGRFTISRDNSKNTVDLQMNSLRVEDTAIYYCVRGAGRGYTYGPDGFDIWGQGT |
| | | MVTVSSASTGGGGSGGGGSGGGGSGGGGSEIVLTQTPLSSPVTLGQPASISCRSSQSLV |
| | | YSDGNTYLNWLQQRPGQPPRLLIYKVSNRFSGVPDRFSGSGAGTDFTLKISRVEAED |
| 131 | HC Ab10 | QVQLVESGGDVVQPGRSLRLSCAASGFTFGHYAMHWVRQAPGQGLEWVTVISYDGSNKY |
| | | YADSVKGRFTISRDNSKNTVDLQMNSLRVEDTAIYYCVRGAGRGYTYGPDGFDIWGQGT |
| | | MVTVSSKGPSVFPLAPSSRSTSESTAALGCLVKDYFPEPVTVSWNSGALTSGVHTFPAV |
| | | LQSSGLYSLSSVVTVPSSNFGTQTYTCNVDHKPSNTKVDKTVERKCCVECPPCPAPPVA |
| | | GPSVFLFPPKPKDTLMISRTPEVTCVVVDVSHEDPEVQFNWYVDGVEVHNAKTKPREEQ |
| | | FNSTFRVVSVLTVVHQDWLNGKEYKCKVSNKGLPAPIEKTISKTKGQPREPQVYTLPPS |
| | | REEMTKNQVSLTCLVKGFYPSDIAVEWESNGQPENNYKTTPPMLDSDGSFFLYSKLTVD |
| | | KSRWQQGNVFSCSVMHEALHNHYTQKSLSLSPG |
| 132 | LC Ab10 | EIVLTQTPLSSPVTLGQPASISCRSSQSLVYSDGNTYLNWLQQRPGQPPRLLIYKVSNR |
| | | FSGVPDRFSGSGAGTDFTLKISRVEAED |
| 133 | VHCDR1 Ab11 | SYAMH |
| 134 | VHCDR2 Ab11 | VISYDGSNKYYADSVKG |
| 135 | VHCDR3 Ab11 | GAGRGYTYGPDGFDI |
| 136 | VLCDR1 Ab11 | RSSQSLVYTDGITYLS |
| 137 | VLCDR2 Ab11 | EISNRFS |
| 138 | VLCDR3 Ab11 | MQATQFPWT |
| 139 | VH Ab11 | EVQLQESGGGLVQPGGSMKLSCVASGFTFSSYAMHWVRQAPGKGLEWVAVISYDGSNKY |
| | (referred to as | YADSVKGRFTISRDNAKNTLYLQMNSLRAEDTATYYCVRGAGRGYTYGPDGFDIWGQGT |
| | FGF#50b in FIG. | MVTVSS |
| | 2) | |
| 140 | VL Ab11 | DIVMTQSPRSLPVTLGQPASISCRSSQSLVYTDGITYLSWLQQRPGQPPRLLIYEISNR |
| | | FSGVPDRFSGSGAGTDFTLKISRVEAXDVGVYYCMQATQFPWTFGQGTKVDIK |
| 141 | VHVL Ab11 | EVQLQESGGGLVQPGGSMKLSCVASGFTFSSYAMHWVRQAPGKGLEWVAVISYDGSNKY |
| | (scFv) | YADSVKGRFTISRDNAKNTLYLQMNSLRAEDTATYYCVRGAGRGYTYGPDGFDIWGQGT |
| | | MVTVSSASTGGGGSGGGGGSDIVMTQSPRSLPVTLGQPASISCRSSQSLVYTDGITYLS |
| | | WLQQRPGQPPRLLIYEISNRFSGVPDRFSGSGAGTDFTLKISRVEAXDVGVYYCMQATQ |
| | | FPWTFGQGTKVDIKRTVAAPSHHHHHH |
| 142 | HC Ab11 | EVQLQESGGGLVQPGGSMKLSCVASGFTFSSYAMHWVRQAPGKGLEWVAVISYDGSNKY |
| | | YADSVKGRFTISRDNAKNTLYLQMNSLRAEDTATYYCVRGAGRGYTYGPDGFDIWGQGT |
| | | MVTVSSKGPSVFPLAPSSRSTSESTAALGCLVKDYFPEPVTVSWNSGALTSGVHTFPAV |
| | | LQSSGLYSLSSVVTVPSSNFGTQTYTCNVDHKPSNTKVDKTVERKCCVECPPCPAPPVA |
| | | GPSVFLFPPKPKDTLMISRTPEVTCVVVDVSHEDPEVQFNWYVDGVEVHNAKTKPREEQ |
| | | FNSTFRVVSVLTVVHQDWLNGKEYKCKVSNKGLPAPIEKTISKTKGQPREPQVYTLPPS |
| | | REEMTKNQVSLTCLVKGFYPSDIAVEWESNGQPENNYKTTPPMLDSDGSFFLYSKLTVD |
| | | KSRWQQGNVFSCSVMHEALHNHYTQKSLSLSPG |
| 143 | LC Ab11 | DIVMTQSPRSLPVTLGQPASISCRSSQSLVYTDGITYLSWLQQRPGQPPRLLIYEISNR |
| | | FSGVPDRFSGSGAGTDFTLKISRVEAXDVGVYYCMQATQFPWTFGQGTKVDIKRTVAAP |
| | | SVFIFPPSDEQLKSGTASVVCLLNNFYPREAKVQWKVDNALQSGNSQESVTEQDSKDST |
| | | YSLSSTLTLSKADYEKHKVYACEVTHQGLSSPVTKSFNRGEC |
| 144 | VHCDR1 Ab12 | SHDIN |
| 145 | VHCDR2 Ab12 | WINPNNDITDYAQEFQG |
| 146 | VHCDR3 Ab12 | GAGMLFHAVGQFDS |
| 147 | VLCDR1 Ab12 | QASQDIRKNLN |
| 148 | VLCDR2 Ab12 | DASNLDT |
| 149 | VLCDR3 Ab12 | LQYGDLPLT |
| 150 | VH Ab12 | QVQLVQSGAEVKKPGASVKVSCQASGYRFTSHDINWVRQVPGHGLEWMGWINPNNDITD |
| | (referred to as | YAQEFQGRLTMTSDTSTRTAYMELSSLTAEDTAVYYCARGAGMLFHAVGQFDSWGQGTL |
| | FGF#14 in FIG. | VTVSS |
| | 2) | |
| 151 | VL Ab12 | AIRMTQSPSSLSASVGDRVTITCQASQDIRKNLNWYQQKPGKAPELLINDASNLDTGVP |
| | | SRFSGGGSGTDFTFTISSLQPEDIATYFCLQYGDLPLTFXGGTKVDIK |
| 152 | VHVL Ab12 | QVQLVQSGAEVKKPGASVKVSCQASGYRFTSHDINWVRQVPGHGLEWMGWINPNNDITD |
| | (scFv) | YAQEFQGRLTMTSDTSTRTAYMELSSLTAEDTAVYYCARGAGMLFHAVGQFDSWGQGTL |
| | | VTVSSASTGGGGSGGGGSGGGGSGGGGSAIRMTQSPSSLSASVGDRVTITCQASQDIRK |
| | | NLNWYQQKPGKAPELLINDASNLDTGVPSRFSGGGSGTDFTFTISSLQPEDIATYFCLQ |
| | | YGDLPLTFXGGTKVDIKRTVAAPSHHHHHH |
| 153 | HC Ab12 | QVQLVQSGAEVKKPGASVKVSCQASGYRFTSHDINWVRQVPGHGLEWMGWINPNNDITD |
| | | YAQEFQGRLTMTSDTSTRTAYMELSSLTAEDTAVYYCARGAGMLFHAVGQFDSWGQGTL |
| | | VTVSSKGPSVFPLAPSSRSTSESTAALGCLVKDYFPEPVTVSWNSGALTSGVHTFPAVL |
| | | QSSGLYSLSSVVTVPSSNFGTQTYTCNVDHKPSNTKVDKTVERKCCVECPPCPAPPVAG |
| | | PSVFLFPPKPKDTLMISRTPEVTCVVVDVSHEDPEVQFNWYVDGVEVHNAKTKPREEQF |
| | | NSTFRVVSVLTVVHQDWLNGKEYKCKVSNKGLPAPIEKTISKTKGQPREPQVYTLPPSR |
| | | EEMTKNQVSLTCLVKGFYPSDIAVEWESNGQPENNYKTTPPMLDSDGSFFLYSKLTVDK |
| | | SRWQQGNVFSCSVMHEALHNHYTQKSLSLSPG |
| 154 | LC Ab12 | AIRMTQSPSSLSASVGDRVTITCQASQDIRKNLNWYQQKPGKAPELLINDASNLDTGVP |
| | | SRFSGGGSGTDFTFTISSLQPEDIATYFCLQYGDLPLTFXGGTKVDIKRTVAAPSVFIF |
| | | PPSDEQLKSGTASVVCLLNNFYPREAKVQWKVDNALQSGNSQESVTEQDSKDSTYSLSS |
| | | TLTLSKADYEKHKVYACEVTHQGLSSPVTKSFNRGEC |
| 155 | VHCDR1 Ab13 | SHDIN |
| 156 | VHCDR2 Ab13 | WINPNNDITDYAQEFQG |
| 157 | VHCDR3 Ab13 | GAGMLFHAVGQFDS |
| 158 | VLCDR1 Ab13 | RASQSIGRFLN |
| 159 | VLCDR2 Ab13 | TASTLQS |
| 160 | VLCDR3 Ab13 | QQFKNYPT |
| 161 | VH Ab13 | QMQLVQSGAEVKKPGASVKVSCQASGYRFTSHDINWVRQVPGHGLEWMGWINPNNDITD |
| | (referred to as | YAQEFQGRLTMTSDTSTRTAYMELSSLTAEDTAVYYCARGAGMLFHAVGQFDSWGQGTL |
| | FGF#49 in FIG. | VTVSS |
| | 2) | |
| 162 | VL Ab13 | VIWMTQSPSSLSASVGDRVIITCRASQSIGRFLNWYQQTPGKPPKVLIHTASTLQSGVP |
| | | SRFSGSGSGTHFTLTITGLQPEXFATYYCQQFKNYPTFGGGTXVEIK |
| 163 | VHVK Ab13 | QMQLVQSGAEVKKPGASVKVSCQASGYRFTSHDINWVRQVPGHGLEWMGWINPNNDITD |
| | (scFv) | YAQEFQGRLTMTSDTSTRTAYMELSSLTAEDTAVYYCARGAGMLFHAVGQFDSWGQGTL |
| | | VTVSSASTGGGGSGGGGSGGGGSGGGGSVIWMTQSPSSLSASVGDRVIITCRASQSIGR |
| | | FLNWYQQTPGKPPKVLIHTASTLQSGVPSRFSGSGSGTHFTLTITGLQPEXFATYYCQQ |
| | | FKNYPTFGGGTXVEIKRTVAAPSHHHHHH |
| 164 | HC Ab13 | QMQLVQSGAEVKKPGASVKVSCQASGYRFTSHDINWVRQVPGHGLEWMGWINPNNDITD |
| | | YAQEFQGRLTMTSDTSTRTAYMELSSLTAEDTAVYYCARGAGMLFHAVGQFDSWGQGTL |
| | | VTVSSKGPSVFPLAPSSRSTSESTAALGCLVKDYFPEPVTVSWNSGALTSGVHTFPAVL |
| | | QSSGLYSLSSVVTVPSSNFGTQTYTCNVDHKPSNTKVDKTVERKCCVECPPCPAPPVAG |
| | | PSVFLFPPKPKDTLMISRTPEVTCVVVDVSHEDPEVQFNWYVDGVEVHNAKTKPREEQF |
| | | NSTFRVVSVLTVVHQDWLNGKEYKCKVSNKGLPAPIEKTISKTKGQPREPQVYTLPPSR |
| | | EEMTKNQVSLTCLVKGFYPSDIAVEWESNGQPENNYKTTPPMLDSDGSFFLYSKLTVDK |
| | | SRWQQGNVFSCSVMHEALHNHYTQKSLSLSPG |
| 165 | LC Ab13 | VIWMTQSPSSLSASVGDRVIITCRASQSIGRFLNWYQQTPGKPPKVLIHTASTLQSGVP |
| | | SRFSGSGSGTHFTLTITGLQPEXFATYYCQQFKNYPTFGGGTXVEIKRTVAAPSVFIFP |
| | | PSDEQLKSGTASVVCLLNNFYPREAKVQWKVDNALQSGNSQESVTEQDSKDSTYSLSST |
| | | LTLSKADYEKHKVYACEVTHQGLSSPVTKSFNRGEC |
| 166 | VHCDR1 Ab14 | SNYMS |
| 167 | VHCDR2 Ab14 | VIFSDGTTYYADSVKG |
| 168 | VHCDR3 Ab14 | GPANGAYDI |
| 169 | VLCDR1 Ab14 | RASQSISNWLA |
| 170 | VLCDR2 Ab14 | RASTLES |
| 171 | VLCDR3 Ab14 | QQYNVYSGT |
| 172 | VH Ab14 | EVQLVETGGGLIQPGGSLRLSCVASGFTVSSNYMSWVRQAPGKGLEWVSVIFSDGTTYY |
| | (referred to as | ADSVKGRFTISRDNSKNTLYLQMNSLKTEDTAVYYCVAGPANGAYDIWGQGTMVTVSS |
| | FGF#24 in FIG. | |
| | 2) | |
| 173 | VL Ab14 | NIQMTQSPSILSASVGDRVTITCRASQSISNWLAWYQQKPGKAPKLLIFRASTLESGVP |
| | | SRFSGSGSGAEFNLTISSLQPDDFATYYCQQYNVYSGTFGQGTKVEIK |
| 174 | VHVL Ab14 | EVQLVETGGGLIQPGGSLRLSCVASGFTVSSNYMSWVRQAPGKGLEWVSVIFSDGTTYY |
| | (scFv) | ADSVKGRFTISRDNSKNTLYLQMNSLKTEDTAVYYCVAGPANGAYDIWGQGTMVTVSSA |
| | | STGGGSGGGGSNIQMTQSPSILSASVGDRVTITCRASQSISNWLAWYQQKPGKAPKLLI |
| | | FRASTLESGVPSRFSGSGSGAEFNLTISSLQPDDFATYYCQQYNVYSGTFGQGTKVEIK |
| | | RTVAAPSHHHHHH |
| 175 | HC Ab14 | EVQLVETGGGLIQPGGSLRLSCVASGFTVSSNYMSWVRQAPGKGLEWVSVIFSDGTTYY |
| | | ADSVKGRFTISRDNSKNTLYLQMNSLKTEDTAVYYCVAGPANGAYDIWGQGTMVTVSSK |
| | | GPSVFPLAPSSRSTSESTAALGCLVKDYFPEPVTVSWNSGALTSGVHTFPAVLQSSGLY |
| | | SLSSVVTVPSSNFGTQTYTCNVDHKPSNTKVDKTVERKCCVECPPCPAPPVAGPSVFLF |
| | | PPKPKDTLMISRTPEVTCVVVDVSHEDPEVQFNWYVDGVEVHNAKTKPREEQFNSTFRV |
| | | VSVLTVVHQDWLNGKEYKCKVSNKGLPAPIEKTISKTKGQPREPQVYTLPPSREEMTKN |
| | | QVSLTCLVKGFYPSDIAVEWESNGQPENNYKTTPPMLDSDGSFFLYSKLTVDKSRWQQG |
| | | NVFSCSVMHEALHNHYTQKSLSLSPG |
| 176 | LC Ab14 | NIQMTQSPSILSASVGDRVTITCRASQSISNWLAWYQQKPGKAPKLLIFRASTLESGVP |
| | | SRFSGSGSGAEFNLTISSLQPDDFATYYCQQYNVYSGTFGQGTKVEIKRTVAAPSVFIF |
| | | PPSDEQLKSGTASVVCLLNNFYPREAKVQWKVDNALQSGNSQESVTEQDSKDSTYSLSS |
| | | TLTLSKADYEKHKVYACEVTHQGLSSPVTKSFNRGEC |
| 177 | VHCDR1 Ab15 | SYAMH |
| 178 | VHCDR2 Ab15 | VISYDGSNKYYADSVKG |
| 179 | VHCDR3 Ab15 | GAGRGYTYGPDGFDI |
| 180 | VLCDR1 Ab15 | TSSRSLLHSDGKTYVY |
| 181 | VLCDR2 Ab15 | ELSNRFS |
| 182 | VLCDR3 Ab15 | MQYIEAPLT |
| 183 | VH Ab15 | EVQLLESGGGVVQPGRSLRLSCAASGFTFSSYAMHWVRQAPGKGLEWVAVISYDGSNKY |
| | (referred to as | YADSVKGRFTISRDNSKNTLSLQMNSLRVEDTAIYYCVRGAGRGYTYGPDGFDIWGQGT |
| | FGF#26 in FIG. | MVTVSS |
| | 2) | |
| 184 | VL Ab15 | DIVMTQTPLSLSVTPGQPASISCTSSRSLLHSDGKTYVYWYVQKSGQPPQLLIYELSNR |
| | | FSGVPDRFSGSGSRTDFTLKISRVEAEDVGVYYCMQYIEAPLTFGGGTKVEIK |
| 185 | VHVK Ab15 | EVQLLESGGGVVQPGRSLRLSCAASGFTFSSYAMHWVRQAPGKGLEWVAVISYDGSNKY |
| | (scFv) | YADSVKGRFTISRDNSKNTLSLQMNSLRVEDTAIYYCVRGAGRGYTYGPDGFDIWGQGT |
| | | MVTVSSASTGGGGSGGGGSGGGGSGGGGSDIVMTQTPLSLSVTPGQPASISCTSSRSLL |
| | | HSDGKTYVYWYVQKSGQPPQLLIYELSNRFSGVPDRFSGSGSRTDFTLKISRVEAEDVG |
| | | VYYCMQYIEAPLTFGGGTKVEIKRTVAAPSHHHHHH |
| 186 | HC Ab15 | EVQLLESGGGVVQPGRSLRLSCAASGFTFSSYAMHWVRQAPGKGLEWVAVISYDGSNKY |
| | | YADSVKGRFTISRDNSKNTLSLQMNSLRVEDTAIYYCVRGAGRGYTYGPDGFDIWGQGT |
| | | MVTVSSKGPSVFPLAPSSRSTSESTAALGCLVKDYFPEPVTVSWNSGALTSGVHTFPAV |
| | | LQSSGLYSLSSVVTVPSSNFGTQTYTCNVDHKPSNTKVDKTVERKCCVECPPCPAPPVA |
| | | GPSVFLFPPKPKDTLMISRTPEVTCVVVDVSHEDPEVQFNWYVDGVEVHNAKTKPREEQ |
| | | FNSTFRVVSVLTVVHQDWLNGKEYKCKVSNKGLPAPIEKTISKTKGQPREPQVYTLPPS |
| | | REEMTKNQVSLTCLVKGFYPSDIAVEWESNGQPENNYKTTPPMLDSDGSFFLYSKLTVD |
| | | KSRWQQGNVFSCSVMHEALHNHYTQKSLSLSPG |
| 187 | LC Ab15 | DIVMTQTPLSLSVTPGQPASISCTSSRSLLHSDGKTYVYWYVQKSGQPPQLLIYELSNR |
| | | FSGVPDRFSGSGSRTDFTLKISRVEAEDVGVYYCMQYIEAPLTFGGGTKVEIKRTVAAP |
| | | SVFIFPPSDEQLKSGTASVVCLLNNFYPREAKVQWKVDNALQSGNSQESVTEQDSKDST |
| | | YSLSSTLTLSKADYEKHKVYACEVTHQGLSSPVTKSFNRGEC |
| 188 | VHCDR1 Ab16 | SYAMH |
| 189 | VHCDR2 Ab16 | VISYDGSNKYYADSVKG |
| 190 | VHCDR3 Ab16 | GAGRGYTRGPDGFDI |
| 191 | VLCDR1 Ab16 | KSSRSLLHSDGKTYVY |
| 192 | VLCDR2 Ab16 | ELSNRFS |
| 193 | VLCDR3 Ab16 | MQYIEAPLT |
| 194 | VH Ab16 | EVQLLESGGGVVQPGRSLRLSCAASGFTFSSYAMHWVRQAPGKGLEWVAVISYDGSNKY |
| | | YADSVKGRFTISRDNSKNTLSLQMNSLRVEDTAIYYCVRGAGRGYTRGPDGFDIWGQGT |
| | | MVTVSS |
| 195 | VL Ab16 | DIVMTQTPLSLSVTPGQPASISCKSSRSLLHSDGKTYVYWYVQKSGQPPQLLIYELSNR |
| | | FSGVPDRFSGSGSRTDFTLKISRVEAEDVGVYYCMQYIEAPLTFGGGTKVEIK |
| 196 | HC Ab16 | EVQLLESGGGVVQPGRSLRLSCAASGFTFSSYAMHWVRQAPGKGLEWVAVISYDGSNKY |
| | | YADSVKGRFTISRDNSKNTLSLQMNSLRVEDTAIYYCVRGAGRGYTRGPDGFDIWGQGT |
| | | MVTVSSKGPSVFPLAPSSRSTSESTAALGCLVKDYFPEPVTVSWNSGALTSGVHTFPAV |
| | | LQSSGLYSLSSVVTVPSSNFGTQTYTCNVDHKPSNTKVDKTVERKCCVECPPCPAPPVA |
| | | GPSVFLFPPKPKDTLMISRTPEVTCVVVDVSHEDPEVQFNWYVDGVEVHNAKTKPREEQ |
| | | FNSTFRVVSVLTVVHQDWLNGKEYKCKVSNKGLPAPIEKTISKTKGQPREPQVYTLPPS |
| | | REEMTKNQVSLTCLVKGFYPSDIAVEWESNGQPENNYKTTPPMLDSDGSFFLYSKLTVD |
| | | KSRWQQGNVFSCSVMHEALHNHYTQKSLSLSPG |
| 197 | LC Ab16 | DIVMTQTPLSLSVTPGQPASISCKSSRSLLHSDGKTYVYWYVQKSGQPPQLLIYELSNR |
| | | FSGVPDRFSGSGSRTDFTLKISRVEAEDVGVYYCMQYIEAPLTFGGGTKVEIKRTVAAP |
| | | SVFIFPPSDEQLKSGTASVVCLLNNFYPREAKVQWKVDNALQSGNSQESVTEQDSKDST |
| | | YSLSSTLTLSKADYEKHKVYACEVTHQGLSSPVTKSFNRGEC |
| 198 | VHCDR1 Ab17 | SYAMH |
| 199 | VHCDR2 Ab17 | VISYDGSNKYYADSVKG |
| 200 | VHCDR3 Ab17 | GAGRGYTNGPDGFDI |
| 201 | VLCDR1 Ab17 | KSSRSLLHSDGKTYVY |
| 202 | VLCDR2 Ab17 | ELSNRFS |
| 203 | VLCDR3 Ab17 | MQYIEAPLT |
| 204 | VH Ab17 | EVQLLESGGGVVQPGRSLRLSCAASGFTFSSYAMHWVRQAPGKGLEWVAVISYDGSNKY |
| | | YADSVKGRFTISRDNSKNTLSLQMNSLRVEDTAIYYCVRGAGRGYTNGPDGFDIWGQGT |
| | | MVTVSS |
| 205 | VL Ab17 | DIVMTQTPLSLSVTPGQPASISCKSSRSLLHSDGKTYVYWYVQKSGQPPQLLIYELSNR |
| | | FSGVPDRFSGSGSRTDFTLKISRVEAEDVGVYYCMQYIEAPLTFGGGTKVEIK |
| 206 | HC Ab17 | EVQLLESGGGVVQPGRSLRLSCAASGFTFSSYAMHWVRQAPGKGLEWVAVISYDGSNKY |
| | | YADSVKGRFTISRDNSKNTLSLQMNSLRVEDTAIYYCVRGAGRGYTNGPDGFDIWGQGT |
| | | MVTVSSKGPSVFPLAPSSRSTSESTAALGCLVKDYFPEPVTVSWNSGALTSGVHTFPAV |
| | | LQSSGLYSLSSVVTVPSSNFGTQTYTCNVDHKPSNTKVDKTVERKCCVECPPCPAPPVA |
| | | GPSVFLFPPKPKDTLMISRTPEVTCVVVDVSHEDPEVQFNWYVDGVEVHNAKTKPREEQ |
| | | FNSTFRVVSVLTVVHQDWLNGKEYKCKVSNKGLPAPIEKTISKTKGQPREPQVYTLPPS |
| | | REEMTKNQVSLTCLVKGFYPSDIAVEWESNGQPENNYKTTPPMLDSDGSFFLYSKLTVD |
| | | KSRWQQGNVFSCSVMHEALHNHYTQKSLSLSPG |
| 207 | LC Ab17 | DIVMTQTPLSLSVTPGQPASISCKSSRSLLHSDGKTYVYWYVQKSGQPPQLLIYELSNR |
| | | FSGVPDRFSGSGSRTDFTLKISRVEAEDVGVYYCMQYIEAPLTFGGGTKVEIKRTVAAP |
| | | SVFIFPPSDEQLKSGTASVVCLLNNFYPREAKVQWKVDNALQSGNSQESVTEQDSKDST |
| | | YSLSSTLTLSKADYEKHKVYACEVTHQGLSSPVTKSFNRGEC |
| 208 | VHCDR1 Ab18 | SYAMH |
| 209 | VHCDR2 Ab18 | VISYDGSNKYYADSVKG |
| 210 | VHCDR3 Ab18 | GAGRGFTWGPDGFDI |
| 211 | VLCDR1 Ab18 | KSSRSLLHSDGKTYVY |
| 212 | VLCDR2 Ab18 | ELSNRFS |
| 213 | VLCDR3 Ab18 | MQYIEAPLT |
| 214 | VH Ab18 | EVQLLESGGGVVQPGRSLRLSCAASGFTFSSYAMHWVRQAPGKGLEWVAVISYDGSNKY |
| | | YADSVKGRFTISRDNSKNTLSLQMNSLRVEDTAIYYCVRGAGRGFTWGPDGFDIWGQGT |
| | | MVTVSS |
| 215 | VL Ab18 | DIVMTQTPLSLSVTPGQPASISCKSSRSLLHSDGKTYVYWYVQKSGQPPQLLIYELSNR |
| | | FSGVPDRFSGSGSRTDFTLKISRVEAEDVGVYYCMQYIEAPLTFGGGTKVEIK |
| 216 | HC Ab18 | EVQLLESGGGVVQPGRSLRLSCAASGFTFSSYAMHWVRQAPGKGLEWVAVISYDGSNKY |
| | | YADSVKGRFTISRDNSKNTLSLQMNSLRVEDTAIYYCVRGAGRGFTWGPDGFDIWGQGT |
| | | MVTVSSKGPSVFPLAPSSRSTSESTAALGCLVKDYFPEPVTVSWNSGALTSGVHTFPAV |
| | | LQSSGLYSLSSVVTVPSSNFGTQTYTCNVDHKPSNTKVDKTVERKCCVECPPCPAPPVA |
| | | GPSVFLFPPKPKDTLMISRTPEVTCVVVDVSHEDPEVQFNWYVDGVEVHNAKTKPREEQ |
| | | FNSTFRVVSVLTVVHQDWLNGKEYKCKVSNKGLPAPIEKTISKTKGQPREPQVYTLPPS |
| | | REEMTKNQVSLTCLVKGFYPSDIAVEWESNGQPENNYKTTPPMLDSDGSFFLYSKLTVD |
| | | KSRWQQGNVFSCSVMHEALHNHYTQKSLSLSPG |
| 217 | LC Ab18 | DIVMTQTPLSLSVTPGQPASISCKSSRSLLHSDGKTYVYWYVQKSGQPPQLLIYELSNR |
| | | FSGVPDRFSGSGSRTDFTLKISRVEAEDVGVYYCMQYIEAPLTFGGGTKVEIKRTVAAP |
| | | SVFIFPPSDEQLKSGTASVVCLLNNFYPREAKVQWKVDNALQSGNSQESVTEQDSKDST |
| | | YSLSSTLTLSKADYEKHKVYACEVTHQGLSSPVTKSFNRGEC |
| 218 | VHCDR1 Ab19 | SYAMH |
| 219 | VHCDR2 Ab19 | VISYDGSNKYYADSVKG |
| 220 | VLCDR3 Ab19 | GAGRGFTLGPDGFDI |
| 221 | VLCDR1 Ab19 | KSSRSLLHSDGKTYVY |
| 222 | VLCDR2 Ab19 | ELSNRFS |
| 223 | VLCDR3 Ab19 | MQYIEAPLT |
| 224 | VH Ab19 | EVQLLESGGGVVQPGRSLRLSCAASGFTFSSYAMHWVRQAPGKGLEWVAVISYDGSNKY |
| | | YADSVKGRFTISRDNSKNTLSLQMNSLRVEDTAIYYCVRGAGRGFTLGPDGFDIWGQGT |
| | | MVTVSS |
| 225 | VL Ab19 | DIVMTQTPLSLSVTPGQPASISCKSSRSLLHSDGKTYVYWYVQKSGQPPQLLIYELSNR |
| | | FSGVPDRFSGSGSRTDFTLKISRVEAEDVGVYYCMQYIEAPLTFGGGTKVEIK |
| 226 | HC Ab19 | EVQLLESGGGVVQPGRSLRLSCAASGFTFSSYAMHWVRQAPGKGLEWVAVISYDGSNKY |
| | | YADSVKGRFTISRDNSKNTLSLQMNSLRVEDTAIYYCVRGAGRGFTLGPDGFDIWGQGT |
| | | MVTVSSKGPSVFPLAPSSRSTSESTAALGCLVKDYFPEPVTVSWNSGALTSGVHTFPAV |
| | | LQSSGLYSLSSVVTVPSSNFGTQTYTCNVDHKPSNTKVDKTVERKCCVECPPCPAPPVA |
| | | GPSVFLFPPKPKDTLMISRTPEVTCVVVDVSHEDPEVQFNWYVDGVEVHNAKTKPREEQ |
| | | FNSTFRVVSVLTVVHQDWLNGKEYKCKVSNKGLPAPIEKTISKTKGQPREPQVYTLPPS |
| | | REEMTKNQVSLTCLVKGFYPSDIAVEWESNGQPENNYKTTPPMLDSDGSFFLYSKLTVD |
| | | KSRWQQGNVFSCSVMHEALHNHYTQKSLSLSPG |
| 227 | LC Ab19 | DIVMTQTPLSLSVTPGQPASISCKSSRSLLHSDGKTYVYWYVQKSGQPPQLLIYELSNR |
| | | FSGVPDRFSGSGSRTDFTLKISRVEAEDVGVYYCMQYIEAPLTFGGGTKVEIKRTVAAP |
| | | SVFIFPPSDEQLKSGTASVVCLLNNFYPREAKVQWKVDNALQSGNSQESVTEQDSKDST |
| | | YSLSSTLTLSKADYEKHKVYACEVTHQGLSSPVTKSFNRGEC |
| 228 | VHCDR1 Ab20 | SYAMH |
| 229 | VHCDR2 Ab20 | VISYDGSNKYYADSVKG |
| 230 | VLCDR3 Ab20 | GAGRGLTFGPDGFDI |
| 231 | VLCDR1 Ab20 | KSSRSLLHSDGKTYVY |
| 232 | VLCDR2 Ab20 | ELSNRFS |
| 233 | VLCDR3 Ab20 | MQYIEAPLT |
| 234 | VH Ab20 | EVQLLESGGGVVQPGRSLRLSCAASGFTFSSYAMHWVRQAPGKGLEWVAVISYDGSNKY |
| | | YADSVKGRFTISRDNSKNTLSLQMNSLRVEDTAIYYCVRGAGRGLTFGPDGFDIWGQGT |
| | | MVTVSS |
| 235 | VL Ab20 | DIVMTQTPLSLSVTPGQPASISCKSSRSLLHSDGKTYVYWYVQKSGQPPQLLIYELSNR |
| | | FSGVPDRFSGSGSRTDFTLKISRVEAEDVGVYYCMQYIEAPLTFGGGTKVEIK |
| 236 | HC Ab20 | EVQLLESGGGVVQPGRSLRLSCAASGFTFSSYAMHWVRQAPGKGLEWVAVISYDGSNKY |
| | | YADSVKGRFTISRDNSKNTLSLQMNSLRVEDTAIYYCVRGAGRGLTFGPDGFDIWGQGT |
| | | MVTVSSKGPSVFPLAPSSRSTSESTAALGCLVKDYFPEPVTVSWNSGALTSGVHTFPAV |
| | | LQSSGLYSLSSVVTVPSSNFGTQTYTCNVDHKPSNTKVDKTVERKCCVECPPCPAPPVA |
| | | GPSVFLFPPKPKDTLMISRTPEVTCVVVDVSHEDPEVQFNWYVDGVEVHNAKTKPREEQ |
| | | FNSTFRVVSVLTVVHQDWLNGKEYKCKVSNKGLPAPIEKTISKTKGQPREPQVYTLPPS |
| | | REEMTKNQVSLTCLVKGFYPSDIAVEWESNGQPENNYKTTPPMLDSDGSFFLYSKLTVD |
| | | KSRWQQGNVFSCSVMHEALHNHYTQKSLSLSPG |
| 237 | LC Ab20 | DIVMTQTPLSLSVTPGQPASISCKSSRSLLHSDGKTYVYWYVQKSGQPPQLLIYELSNR |
| | | FSGVPDRFSGSGSRTDFTLKISRVEAEDVGVYYCMQYIEAPLTFGGGTKVEIKRTVAAP |
| | | SVFIFPPSDEQLKSGTASVVCLLNNFYPREAKVQWKVDNALQSGNSQESVTEQDSKDST |
| | | YSLSSTLTLSKADYEKHKVYACEVTHQGLSSPVTKSFNRGEC |
| 238 | VHCDR1 Ab21 | SYAMH |
| 239 | VHCDR2 Ab21 | VISYDGSNKYYADSVKG |
| 240 | VLCDR3 Ab21 | GAGLGWPYGPDGFDI |
| 241 | VLCDR1 Ab21 | KSSRSLLHSDGKTYVY |
| 242 | VLCDR2 Ab21 | ELSNRFS |
| 243 | VLCDR3 Ab21 | MQYIEAPLT |
| 244 | VH Ab21 | EVQLLESGGGVVQPGRSLRLSCAASGFTFSSYAMHWVRQAPGKGLEWVAVISYDGSNKY |
| | | YADSVKGRFTISRDNSKNTLSLQMNSLRVEDTAIYYCVRGAGLGWPYGPDGFDIWGQGT |
| | | MVTVSS |
| 245 | VL Ab21 | DIVMTQTPLSLSVTPGQPASISCKSSRSLLHSDGKTYVYWYVQKSGQPPQLLIYELSNR |
| | | FSGVPDRFSGSGSRTDFTLKISRVEAEDVGVYYCMQYIEAPLTFGGGTKVEIK |
| 246 | HC Ab21 | EVQLLESGGGVVQPGRSLRLSCAASGFTFSSYAMHWVRQAPGKGLEWVAVISYDGSNKY |
| | | YADSVKGRFTISRDNSKNTLSLQMNSLRVEDTAIYYCVRGAGLGWPYGPDGFDIWGQGT |
| | | MVTVSSKGPSVFPLAPSSRSTSESTAALGCLVKDYFPEPVTVSWNSGALTSGVHTFPAV |
| | | LQSSGLYSLSSVVTVPSSNFGTQTYTCNVDHKPSNTKVDKTVERKCCVECPPCPAPPVA |
| | | GPSVFLFPPKPKDTLMISRTPEVTCVVVDVSHEDPEVQFNWYVDGVEVHNAKTKPREEQ |
| | | FNSTFRVVSVLTVVHQDWLNGKEYKCKVSNKGLPAPIEKTISKTKGQPREPQVYTLPPS |
| | | REEMTKNQVSLTCLVKGFYPSDIAVEWESNGQPENNYKTTPPMLDSDGSFFLYSKLTVD |
| | | KSRWQQGNVFSCSVMHEALHNHYTQKSLSLSPG |
| 247 | LC Ab21 | DIVMTQTPLSLSVTPGQPASISCKSSRSLLHSDGKTYVYWYVQKSGQPPQLLIYELSNR |
| | | FSGVPDRFSGSGSRTDFTLKISRVEAEDVGVYYCMQYIEAPLTFGGGTKVEIKRTVAAP |
| | | SVFIFPPSDEQLKSGTASVVCLLNNFYPREAKVQWKVDNALQSGNSQESVTEQDSKDST |
| | | YSLSSTLTLSKADYEKHKVYACEVTHQGLSSPVTKSFNRGEC |
| 248 | VHCDR1 Ab22 | SYAMH |
| 249 | VHCDR2 Ab22 | VISYDGSNKYYADSVKG |
| 250 | VLCDR3 Ab22 | GAGRGFTKGPDGFDI |
| 251 | VLCDR1 Ab22 | KSSRSLLHSDGKTYVY |
| 252 | VLCDR2 Ab22 | ELSNRFS |
| 253 | VLCDR3 Ab22 | MQYIEAPLT |
| 254 | VH Ab22 | EVQLLESGGGVVQPGRSLRLSCAASGFTFSSYAMHWVRQAPGKGLEWVAVISYDGSNKY |
| | | YADSVKGRFTISRDNSKNTLSLQMNSLRVEDTAIYYCVRGAGRGFTKGPDGFDIWGQGT |
| | | MVTVSS |
| 255 | VL Ab22 | DIVMTQTPLSLSVTPGQPASISCKSSRSLLHSDGKTYVYWYVQKSGQPPQLLIYELSNR |
| | | FSGVPDRFSGSGSRTDFTLKISRVEAEDVGVYYCMQYIEAPLTFGGGTKVEIK |
| 256 | HC Ab22 | EVQLLESGGGVVQPGRSLRLSCAASGFTFSSYAMHWVRQAPGKGLEWVAVISYDGSNKY |
| | | YADSVKGRFTISRDNSKNTLSLQMNSLRVEDTAIYYCVRGAGRGFTKGPDGFDIWGQGT |
| | | MVTVSSKGPSVFPLAPSSRSTSESTAALGCLVKDYFPEPVTVSWNSGALTSGVHTFPAV |
| | | LQSSGLYSLSSVVTVPSSNFGTQTYTCNVDHKPSNTKVDKTVERKCCVECPPCPAPPVA |
| | | GPSVFLFPPKPKDTLMISRTPEVTCVVVDVSHEDPEVQFNWYVDGVEVHNAKTKPREEQ |
| | | FNSTFRVVSVLTVVHQDWLNGKEYKCKVSNKGLPAPIEKTISKTKGQPREPQVYTLPPS |
| | | REEMTKNQVSLTCLVKGFYPSDIAVEWESNGQPENNYKTTPPMLDSDGSFFLYSKLTVD |
| | | KSRWQQGNVFSCSVMHEALHNHYTQKSLSLSPG |
| 257 | LC Ab22 | DIVMTQTPLSLSVTPGQPASISCKSSRSLLHSDGKTYVYWYVQKSGQPPQLLIYELSNR |
| | | FSGVPDRFSGSGSRTDFTLKISRVEAEDVGVYYCMQYIEAPLTFGGGTKVEIKRTVAAP |
| | | SVFIFPPSDEQLKSGTASVVCLLNNFYPREAKVQWKVDNALQSGNSQESVTEQDSKDST |
| | | YSLSSTLTLSKADYEKHKVYACEVTHQGLSSPVTKSFNRGEC |
| 258 | VHCDR1 Ab23 | SYAMH |
| 259 | VHCDR2 Ab23 | VISYDGSNKYYADSVKG |
| 260 | VLCDR3 Ab23 | GAGRGLTYGPDGFDI |
| 261 | VLCDR1 Ab23 | KSSRSLLHSDGKTYVY |
| 262 | VLCDR2 Ab23 | ELSNRFS |
| 263 | VLCDR3 Ab23 | MQYIEAPLT |
| 264 | VH Ab23 | EVQLLESGGGVVQPGRSLRLSCAASGFTFSSYAMHWVRQAPGKGLEWVAVISYDGSNKY |
| | | YADSVKGRFTISRDNSKNTLSLQMNSLRVEDTAIYYCVRGAGRGLTYGPDGFDIWGQGT |
| | | MVTVSS |
| 265 | VL Ab23 | DIVMTQTPLSLSVTPGQPASISCKSSRSLLHSDGKTYVYWYVQKSGQPPQLLIYELSNR |
| | | FSGVPDRFSGSGSRTDFTLKISRVEAEDVGVYYCMQYIEAPLTFGGGTKVEIK |
| 266 | HC Ab23 | EVQLLESGGGVVQPGRSLRLSCAASGFTFSSYAMHWVRQAPGKGLEWVAVISYDGSNKY |
| | | YADSVKGRFTISRDNSKNTLSLQMNSLRVEDTAIYYCVRGAGRGLTYGPDGFDIWGQGT |
| | | MVTVSSKGPSVFPLAPSSRSTSESTAALGCLVKDYFPEPVTVSWNSGALTSGVHTFPAV |
| | | LQSSGLYSLSSVVTVPSSNFGTQTYTCNVDHKPSNTKVDKTVERKCCVECPPCPAPPVA |
| | | GPSVFLFPPKPKDTLMISRTPEVTCVVVDVSHEDPEVQFNWYVDGVEVHNAKTKPREEQ |
| | | FNSTFRVVSVLTVVHQDWLNGKEYKCKVSNKGLPAPIEKTISKTKGQPREPQVYTLPPS |
| | | REEMTKNQVSLTCLVKGFYPSDIAVEWESNGQPENNYKTTPPMLDSDGSFFLYSKLTVD |
| | | KSRWQQGNVFSCSVMHEALHNHYTQKSLSLSPG |
| 267 | LC Ab23 | DIVMTQTPLSLSVTPGQPASISCKSSRSLLHSDGKTYVYWYVQKSGQPPQLLIYELSNR |
| | | FSGVPDRFSGSGSRTDFTLKISRVEAEDVGVYYCMQYIEAPLTFGGGTKVEIK |
| 268 | VHCDR1 Ab24 | SYAMH |
| 269 | VHCDR2 Ab24 | VISYDGSNKYYADSVKG |
| 270 | VLCDR3 Ab24 | GAGRGLIYGPDGFDI |
| 271 | VLCDR1 Ab24 | KSSRSLLHSDGKTYVY |
| 272 | VLCDR2 Ab24 | ELSNRFS |
| 273 | VLCDR3 Ab24 | MQYIEAPLT |
| 274 | VH Ab24 | EVQLLESGGGVVQPGRSLRLSCAASGFTFSSYAMHWVRQAPGKGLEWVAVISYDGSNKY |
| | | YADSVKGRFTISRDNSKNTLSLQMNSLRVEDTAIYYCVRGAGRGLIYGPDGFDIWGQGT |
| | | MVTVSS |
| 275 | VL Ab24 | DIVMTQTPLSLSVTPGQPASISCKSSRSLLHSDGKTYVYWYVQKSGQPPQLLIYELSNR |
| | | FSGVPDRFSGSGSRTDFTLKISRVEAEDVGVYYCMQYIEAPLTFGGGTKVEIK |
| 276 | HC Ab24 | EVQLLESGGGVVQPGRSLRLSCAASGFTFSSYAMHWVRQAPGKGLEWVAVISYDGSNKY |
| | | YADSVKGRFTISRDNSKNTLSLQMNSLRVEDTAIYYCVRGAGRGLIYGPDGFDIWGQGT |
| | | MVTVSSKGPSVFPLAPSSRSTSESTAALGCLVKDYFPEPVTVSWNSGALTSGVHTFPAV |
| | | LQSSGLYSLSSVVTVPSSNFGTQTYTCNVDHKPSNTKVDKTVERKCCVECPPCPAPPVA |
| | | GPSVFLFPPKPKDTLMISRTPEVTCVVVDVSHEDPEVQFNWYVDGVEVHNAKTKPREEQ |
| | | FNSTFRVVSVLTVVHQDWLNGKEYKCKVSNKGLPAPIEKTISKTKGQPREPQVYTLPPS |
| | | REEMTKNQVSLTCLVKGFYPSDIAVEWESNGQPENNYKTTPPMLDSDGSFFLYSKLTVD |
| | | KSRWQQGNVFSCSVMHEALHNHYTQKSLSLSPG |
| 277 | LC Ab24 | DIVMTQTPLSLSVTPGQPASISCKSSRSLLHSDGKTYVYWYVQKSGQPPQLLIYELSNR |
| | | FSGVPDRFSGSGSRTDFTLKISRVEAEDVGVYYCMQYIEAPLTFGGGTKVEIK |
| 278 | VHCDR1 Ab25 | SYAMH |
| 279 | VHCDR2 Ab25 | VISYDGSNKYYADSVKG |
| 280 | VLCDR3 Ab25 | GAGLGFTYGPDGFDI |
| 281 | VLCDR1 Ab25 | KSSRSLLHSDGKTYVY |
| 282 | VLCDR2 Ab25 | ELSNRFS |
| 283 | VLCDR3 Ab25 | MQYIEAPLT |
| 284 | VH Ab25 | EVQLLESGGGVVQPGRSLRLSCAASGFTFSSYAMHWVRQAPGKGLEWVAVISYDGSNKY |
| | | YADSVKGRFTISRDNSKNTLSLQMNSLRVEDTAIYYCVRGAGLGFTYGPDGFDIWGQGT |
| | | MVTVSS |
| 285 | VL Ab25 | DIVMTQTPLSLSVTPGQPASISCKSSRSLLHSDGKTYVYWYVQKSGQPPQLLIYELSNR |
| | | FSGVPDRFSGSGSRTDFTLKISRVEAEDVGVYYCMQYIEAPLTFGGGTKVEIK |
| 286 | HC Ab25 | EVQLLESGGGVVQPGRSLRLSCAASGFTFSSYAMHWVRQAPGKGLEWVAVISYDGSNKY |
| | | YADSVKGRFTISRDNSKNTLSLQMNSLRVEDTAIYYCVRGAGLGFTYGPDGFDIWGQGT |
| | | MVTVSSKGPSVFPLAPSSRSTSESTAALGCLVKDYFPEPVTVSWNSGALTSGVHTFPAV |
| | | LQSSGLYSLSSVVTVPSSNFGTQTYTCNVDHKPSNTKVDKTVERKCCVECPPCPAPPVA |
| | | GPSVFLFPPKPKDTLMISRTPEVTCVVVDVSHEDPEVQFNWYVDGVEVHNAKTKPREEQ |
| | | FNSTFRVVSVLTVVHQDWLNGKEYKCKVSNKGLPAPIEKTISKTKGQPREPQVYTLPPS |
| | | REEMTKNQVSLTCLVKGFYPSDIAVEWESNGQPENNYKTTPPMLDSDGSFFLYSKLTVD |
| | | KSRWQQGNVFSCSVMHEALHNHYTQKSLSLSPG |
| 287 | LC Ab25 | DIVMTQTPLSLSVTPGQPASISCKSSRSLLHSDGKTYVYWYVQKSGQPPQLLIYELSNR |
| | | FSGVPDRFSGSGSRTDFTLKISRVEAEDVGVYYCMQYIEAPLTFGGGTKVEIKRTVAAP |
| | | SVFIFPPSDEQLKSGTASVVCLLNNFYPREAKVQWKVDNALQSGNSQESVTEQDSKDST |
| | | YSLSSTLTLSKADYEKHKVYACEVTHQGLSSPVTKSFNRGEC |
| 288 | VHCDR1 Ab26 | SYAMH |
| 289 | VHCDR2 Ab26 | VISYDGSNKYYADSVKG |
| 290 | VLCDR3 Ab26 | GAGQGLSYGPDGFDI |
| 291 | VLCDR1 Ab26 | KSSRSLLHSDGKTYVY |
| 292 | VLCDR2 Ab26 | ELSNRFS |
| 293 | VLCDR3 Ab26 | MQYIEAPLT |
| 294 | VH Ab26 | EVQLLESGGGVVQPGRSLRLSCAASGFTFSSYAMHWVRQAPGKGLEWVAVISYDGSNKY |
| | | YADSVKGRFTISRDNSKNTLSLQMNSLRVEDTAIYYCVRGAGQGLSYGPDGFDIWGQGT |
| | | MVTVSS |
| 295 | VL Ab26 | DIVMTQTPLSLSVTPGQPASISCKSSRSLLHSDGKTYVYWYVQKSGQPPQLLIYELSNR |
| | | FSGVPDRFSGSGSRTDFTLKISRVEAEDVGVYYCMQYIEAPLTFGGGTKVEIK |
| 296 | HC Ab26 | EVQLLESGGGVVQPGRSLRLSCAASGFTFSSYAMHWVRQAPGKGLEWVAVISYDGSNKY |
| | | YADSVKGRFTISRDNSKNTLSLQMNSLRVEDTAIYYCVRGAGQGLSYGPDGFDIWGQGT |
| | | MVTVSSKGPSVFPLAPSSRSTSESTAALGCLVKDYFPEPVTVSWNSGALTSGVHTFPAV |
| | | LQSSGLYSLSSVVTVPSSNFGTQTYTCNVDHKPSNTKVDKTVERKCCVECPPCPAPPVA |
| | | GPSVFLFPPKPKDTLMISRTPEVTCVVVDVSHEDPEVQFNWYVDGVEVHNAKTKPREEQ |
| | | FNSTFRVVSVLTVVHQDWLNGKEYKCKVSNKGLPAPIEKTISKTKGQPREPQVYTLPPS |
| | | REEMTKNQVSLTCLVKGFYPSDIAVEWESNGQPENNYKTTPPMLDSDGSFFLYSKLTVD |
| | | KSRWQQGNVFSCSVMHEALHNHYTQKSLSLSPG |
| 297 | LC Ab26 | DIVMTQTPLSLSVTPGQPASISCKSSRSLLHSDGKTYVYWYVQKSGQPPQLLIYELSNR |
| | | FSGVPDRFSGSGSRTDFTLKISRVEAEDVGVYYCMQYIEAPLTFGGGTKVEIKRTVAAP |
| | | SVFIFPPSDEQLKSGTASVVCLLNNFYPREAKVQWKVDNALQSGNSQESVTEQDSKDST |
| | | YSLSSTLTLSKADYEKHKVYACEVTHQGLSSPVTKSFNRGEC |
| 298 | VHCDR1 Ab27 | SYAMH |
| 299 | VHCDR2 Ab27 | VISYDGSNKYYADSVKG |
| 300 | VLCDR3 Ab27 | GAGRGYTLGPDGFDI |
| 301 | VLCDR1 Ab27 | KSSRSLLHSDGKTYVY |
| 302 | VLCDR2 Ab27 | ELSNRFS |
| 303 | VLCDR3 Ab27 | MQYIEAPLT |
| 304 | VH Ab27 | EVQLLESGGGVVQPGRSLRLSCAASGFTFSSYAMHWVRQAPGKGLEWVAVISYDGSNKY |
| | | YADSVKGRFTISRDNSKNTLSLQMNSLRVEDTAIYYCVRGAGRGYTLGPDGFDIWGQGT |
| | | MVTVSS |
| 305 | VL Ab27 | DIVMTQTPLSLSVTPGQPASISCKSSRSLLHSDGKTYVYWYVQKSGQPPQLLIYELSNR |
| | | FSGVPDRFSGSGSRTDFTLKISRVEAEDVGVYYCMQYIEAPLTFGGGTKVEIK |
| 306 | HC Ab27 | EVQLLESGGGVVQPGRSLRLSCAASGFTFSSYAMHWVRQAPGKGLEWVAVISYDGSNKY |
| | | YADSVKGRFTISRDNSKNTLSLQMNSLRVEDTAIYYCVRGAGRGYTLGPDGFDIWGQGT |
| | | MVTVSSKGPSVFPLAPSSRSTSESTAALGCLVKDYFPEPVTVSWNSGALTSGVHTFPAV |
| | | LQSSGLYSLSSVVTVPSSNFGTQTYTCNVDHKPSNTKVDKTVERKCCVECPPCPAPPVA |
| | | GPSVFLFPPKPKDTLMISRTPEVTCVVVDVSHEDPEVQFNWYVDGVEVHNAKTKPREEQ |
| | | FNSTFRVVSVLTVVHQDWLNGKEYKCKVSNKGLPAPIEKTISKTKGQPREPQVYTLPPS |
| | | REEMTKNQVSLTCLVKGFYPSDIAVEWESNGQPENNYKTTPPMLDSDGSFFLYSKLTVD |
| | | KSRWQQGNVFSCSVMHEALHNHYTQKSLSLSPG |
| 307 | LC Ab27 | DIVMTQTPLSLSVTPGQPASISCKSSRSLLHSDGKTYVYWYVQKSGQPPQLLIYELSNR |
| | | FSGVPDRFSGSGSRTDFTLKISRVEAEDVGVYYCMQYIEAPLTFGGGTKVEIKRTVAAP |
| | | SVFIFPPSDEQLKSGTASVVCLLNNFYPREAKVQWKVDNALQSGNSQESVTEQDSKDST |
| | | YSLSSTLTLSKADYEKHKVYACEVTHQGLSSPVTKSFNRGEC |
| 308 | VHCDR1 Ab28 | SYAMH |
| 309 | VHCDR2 Ab28 | VISYDGSNKYYADSVKG |
| 310 | VLCDR3 Ab28 | GAGRGFTYGPDGFDI |
| 311 | VLCDR1 Ab28 | KSSRSLLHSDGKTYVY |
| 312 | VLCDR2 Ab28 | ELSNRFS |
| 313 | VLCDR3 Ab28 | MQYIEAPLT |
| 314 | VH Ab28 | EVQLLESGGGVVQPGRSLRLSCAASGFTFSSYAMHWVRQAPGKGLEWVAVISYDGSNKY |
| | | YADSVKGRFTISRDNSKNTLSLQMNSLRVEDTAIYYCVRGAGRGFTYGPDGFDIWGQGT |
| | | MVTVSS |
| 315 | VL Ab28 | DIVMTQTPLSLSVTPGQPASISCKSSRSLLHSDGKTYVYWYVQKSGQPPQLLIYELSNR |
| | | FSGVPDRFSGSGSRTDFTLKISRVEAEDVGVYYCMQYIEAPLTFGGGTKVEIK |
| 316 | HC Ab28 | EVQLLESGGGVVQPGRSLRLSCAASGFTFSSYAMHWVRQAPGKGLEWVAVISYDGSNKY |
| | | YADSVKGRFTISRDNSKNTLSLQMNSLRVEDTAIYYCVRGAGRGFTYGPDGFDIWGQGT |
| | | MVTVSSKGPSVFPLAPSSRSTSESTAALGCLVKDYFPEPVTVSWNSGALTSGVHTFPAV |
| | | LQSSGLYSLSSVVTVPSSNFGTQTYTCNVDHKPSNTKVDKTVERKCCVECPPCPAPPVA |
| | | GPSVFLFPPKPKDTLMISRTPEVTCVVVDVSHEDPEVQFNWYVDGVEVHNAKTKPREEQ |
| | | FNSTFRVVSVLTVVHQDWLNGKEYKCKVSNKGLPAPIEKTISKTKGQPREPQVYTLPPS |
| | | REEMTKNQVSLTCLVKGFYPSDIAVEWESNGQPENNYKTTPPMLDSDGSFFLYSKLTVD |
| | | KSRWQQGNVFSCSVMHEALHNHYTQKSLSLSPG |
| 317 | LC Ab28 | DIVMTQTPLSLSVTPGQPASISCKSSRSLLHSDGKTYVYWYVQKSGQPPQLLIYELSNR |
| | | FSGVPDRFSGSGSRTDFTLKISRVEAEDVGVYYCMQYIEAPLTFGGGTKVEIKRTVAAP |
| | | SVFIFPPSDEQLKSGTASVVCLLNNFYPREAKVQWKVDNALQSGNSQESVTEQDSKDST |
| | | YSLSSTLTLSKADYEKHKVYACEVTHQGLSSPVTKSFNRGEC |
| 318 | VHCDR1 Ab29 | SYAMH |
| 319 | VHCDR2 Ab29 | VISYDGSNKYYADSVKG |
| 320 | VLCDR3 Ab29 | GAGLGWPYGPDGFDI |
| 321 | VLCDR1 Ab29 | TSSRSLLHSDGKTYVY |
| 322 | VLCDR2 Ab29 | ELSNRFS |
| 323 | VLCDR3 Ab29 | MQYVEAPLT |
| 324 | VH Ab29 | EVQLLESGGGVVQPGRSLRLSCAASGFTFSSYAMHWVRQAPGKGLEWVAVISYDGSNKY |
| | | YADSVKGRFTISRDNSKNTLSLQMNSLRVEDTAIYYCVRGAGLGWPYGPDGFDIWGQGT |
| | | MVTVSS |
| 325 | VL Ab29 | DIVMTQTPLSLSVTPGQPASISCTSSRSLLHSDGKTYVYWYVQKSGQPPQLLIYELSNR |
| | | FSGVPDRFSGSGSRTDFTLKISRVEAEDVGVYYCMQYVEAPLTFGGGTKVEIK |
| 326 | HC Ab29 | EVQLLESGGGVVQPGRSLRLSCAASGFTFSSYAMHWVRQAPGKGLEWVAVISYDGSNKY |
| | | YADSVKGRFTISRDNSKNTLSLQMNSLRVEDTAIYYCVRGAGLGWPYGPDGFDIWGQGT |
| | | MVTVSSKGPSVFPLAPSSRSTSESTAALGCLVKDYFPEPVTVSWNSGALTSGVHTFPAV |
| | | LQSSGLYSLSSVVTVPSSNFGTQTYTCNVDHKPSNTKVDKTVERKCCVECPPCPAPPVA |
| | | GPSVFLFPPKPKDTLMISRTPEVTCVVVDVSHEDPEVQFNWYVDGVEVHNAKTKPREEQ |
| | | FNSTFRVVSVLTVVHQDWLNGKEYKCKVSNKGLPAPIEKTISKTKGQPREPQVYTLPPS |
| | | REEMTKNQVSLTCLVKGFYPSDIAVEWESNGQPENNYKTTPPMLDSDGSFFLYSKLTVD |
| | | KSRWQQGNVFSCSVMHEALHNHYTQKSLSLSPG |
| 327 | LC Ab29 | DIVMTQTPLSLSVTPGQPASISCTSSRSLLHSDGKTYVYWYVQKSGQPPQLLIYELSNR |
| | | FSGVPDRFSGSGSRTDFTLKISRVEAEDVGVYYCMQYVEAPLTFGGGTKVEIKRTVAAP |
| | | SVFIFPPSDEQLKSGTASVVCLLNNFYPREAKVQWKVDNALQSGNSQESVTEQDSKDST |
| | | YSLSSTLTLSKADYEKHKVYACEVTHQGLSSPVTKSFNRGEC |
| 328 | VHCDR1 Ab30 | SYAMH |
| 329 | VHCDR2 Ab30 | VISYDGSNKYYADSVKG |
| 330 | VLCDR3 Ab30 | GAGRGFTWGPDGFDI |
| 331 | VLCDR1 Ab30 | TSSRSLLHSDGKTYVY |
| 332 | VLCDR2 Ab30 | ELSNRFS |
| 333 | VLCDR3 Ab30 | MQYVEAPLT |
| 334 | VH Ab30 | EVQLLESGGGVVQPGRSLRLSCAASGFTFSSYAMHWVRQAPGKGLEWVAVISYDGSNKY |
| | | YADSVKGRFTISRDNSKNTLSLQMNSLRVEDTAIYYCVRGAGRGFTWGPDGFDIWGQGT |
| | | MVTVSS |
| 335 | VL Ab30 | DIVMTQTPLSLSVTPGQPASISCTSSRSLLHSDGKTYVYWYVQKSGQPPQLLIYELSNR |
| | | FSGVPDRFSGSGSRTDFTLKISRVEAEDVGVYYCMQYVEAPLTFGGGTKVEIK |
| 336 | HC Ab30 | EVQLLESGGGVVQPGRSLRLSCAASGFTFSSYAMHWVRQAPGKGLEWVAVISYDGSNKY |
| | | YADSVKGRFTISRDNSKNTLSLQMNSLRVEDTAIYYCVRGAGRGFTWGPDGFDIWGQGT |
| | | MVTVSSKGPSVFPLAPSSRSTSESTAALGCLVKDYFPEPVTVSWNSGALTSGVHTFPAV |
| | | LQSSGLYSLSSVVTVPSSNFGTQTYTCNVDHKPSNTKVDKTVERKCCVECPPCPAPPVA |
| | | GPSVFLFPPKPKDTLMISRTPEVTCVVVDVSHEDPEVQFNWYVDGVEVHNAKTKPREEQ |
| | | FNSTFRVVSVLTVVHQDWLNGKEYKCKVSNKGLPAPIEKTISKTKGQPREPQVYTLPPS |
| | | REEMTKNQVSLTCLVKGFYPSDIAVEWESNGQPENNYKTTPPMLDSDGSFFLYSKLTVD |
| | | KSRWQQGNVFSCSVMHEALHNHYTQKSLSLSPG |
| 337 | LC Ab30 | DIVMTQTPLSLSVTPGQPASISCTSSRSLLHSDGKTYVYWYVQKSGQPPQLLIYELSNR |
| | | FSGVPDRFSGSGSRTDFTLKISRVEAEDVGVYYCMQYVEAPLTFGGGTKVEIKRTVAAP |
| | | SVFIFPPSDEQLKSGTASVVCLLNNFYPREAKVQWKVDNALQSGNSQESVTEQDSKDST |
| | | YSLSSTLTLSKADYEKHKVYACEVTHQGLSSPVTKSFNRGEC |
| 338 | VHCDR1 Ab31 | SYAMH |
| 339 | VHCDR2 Ab31 | VISYDGSNKYYADSVKG |
| 340 | VLCDR3 Ab31 | GAGRGLTYGPDGFDI |
| 341 | VLCDR1 Ab31 | TSSRSLLHSDGKTYVY |
| 342 | VLCDR2 Ab31 | ELSNRFS |
| 343 | VLCDR3 Ab31 | MQYVEAPLT |
| 344 | VH Ab31 | EVQLLESGGGVVQPGRSLRLSCAASGFTFSSYAMHWVRQAPGKGLEWVAVISYDGSNKY |
| | | YADSVKGRFTISRDNSKNTLSLQMNSLRVEDTAIYYCVRGAGRGLTYGPDGFDIWGQGT |
| | | MVTVSS |
| 345 | VL Ab31 | DIVMTQTPLSLSVTPGQPASISCTSSRSLLHSDGKTYVYWYVQKSGQPPQLLIYELSNR |
| | | FSGVPDRFSGSGSRTDFTLKISRVEAEDVGVYYCMQYVEAPLTFGGGTKVEIK |
| 346 | HC Ab31 | EVQLLESGGGVVQPGRSLRLSCAASGFTFSSYAMHWVRQAPGKGLEWVAVISYDGSNKY |
| | | YADSVKGRFTISRDNSKNTLSLQMNSLRVEDTAIYYCVRGAGRGLTYGPDGFDIWGQGT |
| | | MVTVSSKGPSVFPLAPSSRSTSESTAALGCLVKDYFPEPVTVSWNSGALTSGVHTFPAV |
| | | LQSSGLYSLSSVVTVPSSNFGTQTYTCNVDHKPSNTKVDKTVERKCCVECPPCPAPPVA |
| | | GPSVFLFPPKPKDTLMISRTPEVTCVVVDVSHEDPEVQFNWYVDGVEVHNAKTKPREEQ |
| | | FNSTFRVVSVLTVVHQDWLNGKEYKCKVSNKGLPAPIEKTISKTKGQPREPQVYTLPPS |
| | | REEMTKNQVSLTCLVKGFYPSDIAVEWESNGQPENNYKTTPPMLDSDGSFFLYSKLTVD |
| | | KSRWQQGNVFSCSVMHEALHNHYTQKSLSLSPG |
| 347 | LC Ab31 | DIVMTQTPLSLSVTPGQPASISCTSSRSLLHSDGKTYVYWYVQKSGQPPQLLIYELSNR |
| | | FSGVPDRFSGSGSRTDFTLKISRVEAEDVGVYYCMQYVEAPLTFGGGTKVEIKRTVAAP |
| | | SVFIFPPSDEQLKSGTASVVCLLNNFYPREAKVQWKVDNALQSGNSQESVTEQDSKDST |
| | | YSLSSTLTLSKADYEKHKVYACEVTHQGLSSPVTKSFNRGEC |
| 348 | VHCDR1 Ab32 | SYAMH |
| 349 | VHCDR2 Ab32 | VISYDGSNKYYADSVKG |
| 350 | VLCDR3 Ab32 | GAGLGFTYGPDGFDI |
| 351 | VLCDR1 Ab32 | TSSRSLLHSDGKTYVY |
| 352 | VLCDR2 Ab32 | ELSNRFS |
| 353 | VLCDR3 Ab32 | MQYVEAPLT |
| 354 | VH Ab32 | EVQLLESGGGVVQPGRSLRLSCAASGFTFSSYAMHWVRQAPGKGLEWVAVISYDGSNKY |
| | | YADSVKGRFTISRDNSKNTLSLQMNSLRVEDTAIYYCVRGAGLGFTYGPDGFDIWGQGT |
| | | MVTVSS |
| 355 | VL Ab32 | DIVMTQTPLSLSVTPGQPASISCTSSRSLLHSDGKTYVYWYVQKSGQPPQLLIYELSNR |
| | | FSGVPDRFSGSGSRTDFTLKISRVEAEDVGVYYCMQYVEAPLTFGGGTKVEIK |
| 356 | HC Ab32 | EVQLLESGGGVVQPGRSLRLSCAASGFTFSSYAMHWVRQAPGKGLEWVAVISYDGSNKY |
| | | YADSVKGRFTISRDNSKNTLSLQMNSLRVEDTAIYYCVRGAGLGFTYGPDGFDIWGQGT |
| | | MVTVSSKGPSVFPLAPSSRSTSESTAALGCLVKDYFPEPVTVSWNSGALTSGVHTFPAV |
| | | LQSSGLYSLSSVVTVPSSNFGTQTYTCNVDHKPSNTKVDKTVERKCCVECPPCPAPPVA |
| | | GPSVFLFPPKPKDTLMISRTPEVTCVVVDVSHEDPEVQFNWYVDGVEVHNAKTKPREEQ |
| | | FNSTFRVVSVLTVVHQDWLNGKEYKCKVSNKGLPAPIEKTISKTKGQPREPQVYTLPPS |
| | | REEMTKNQVSLTCLVKGFYPSDIAVEWESNGQPENNYKTTPPMLDSDGSFFLYSKLTVD |
| | | KSRWQQGNVFSCSVMHEALHNHYTQKSLSLSPG |
| 357 | LC Ab32 | DIVMTQTPLSLSVTPGQPASISCTSSRSLLHSDGKTYVYWYVQKSGQPPQLLIYELSNR |
| | | FSGVPDRFSGSGSRTDFTLKISRVEAEDVGVYYCMQYVEAPLTFGGGTKVEIKRTVAAP |
| | | SVFIFPPSDEQLKSGTASVVCLLNNFYPREAKVQWKVDNALQSGNSQESVTEQDSKDST |
| | | YSLSSTLTLSKADYEKHKVYACEVTHQGLSSPVTKSFNRGEC |
| 358 | VHCDR1 Ab33 | SYAMH |
| 359 | VHCDR2 Ab33 | VISYDGSNKYYADSVKG |
| 360 | VLCDR3 Ab33 | GAGQGLSYGPDGFDI |
| 361 | VLCDR1 Ab33 | TSSRSLLHSDGKTYVY |
| 362 | VLCDR2 Ab33 | ELSNRFS |
| 363 | VLCDR3 Ab33 | MQYVEAPLT |
| 364 | VH Ab33 | EVQLLESGGGVVQPGRSLRLSCAASGFTFSSYAMHWVRQAPGKGLEWVAVISYDGSNKY |
| | | YADSVKGRFTISRDNSKNTLSLQMNSLRVEDTAIYYCVRGAGQGLSYGPDGFDIWGQGT |
| | | MVTVSS |
| 365 | VL Ab33 | DIVMTQTPLSLSVTPGQPASISCTSSRSLLHSDGKTYVYWYVQKSGQPPQLLIYELSNR |
| | | FSGVPDRFSGSGSRTDFTLKISRVEAEDVGVYYCMQYVEAPLTFGGGTKVEIK |
| 366 | HC Ab33 | EVQLLESGGGVVQPGRSLRLSCAASGFTFSSYAMHWVRQAPGKGLEWVAVISYDGSNKY |
| | | YADSVKGRFTISRDNSKNTLSLQMNSLRVEDTAIYYCVRGAGQGLSYGPDGFDIWGQGT |
| | | MVTVSSKGPSVFPLAPSSRSTSESTAALGCLVKDYFPEPVTVSWNSGALTSGVHTFPAV |
| | | LQSSGLYSLSSVVTVPSSNFGTQTYTCNVDHKPSNTKVDKTVERKCCVECPPCPAPPVA |
| | | GPSVFLFPPKPKDTLMISRTPEVTCVVVDVSHEDPEVQFNWYVDGVEVHNAKTKPREEQ |
| | | FNSTFRVVSVLTVVHQDWLNGKEYKCKVSNKGLPAPIEKTISKTKGQPREPQVYTLPPS |
| | | REEMTKNQVSLTCLVKGFYPSDIAVEWESNGQPENNYKTTPPMLDSDGSFFLYSKLTVD |
| | | KSRWQQGNVFSCSVMHEALHNHYTQKSLSLSPG |
| 367 | LC Ab33 | DIVMTQTPLSLSVTPGQPASISCTSSRSLLHSDGKTYVYWYVQKSGQPPQLLIYELSNR |
| | | FSGVPDRFSGSGSRTDFTLKISRVEAEDVGVYYCMQYVEAPLTFGGGTKVEIKRTVAAP |
| | | SVFIFPPSDEQLKSGTASVVCLLNNFYPREAKVQWKVDNALQSGNSQESVTEQDSKDST |
| | | YSLSSTLTLSKADYEKHKVYACEVTHQGLSSPVTKSFNRGEC |
| 368 | VHCDR1 Ab34 | SYAMH |
| 369 | VHCDR2 Ab34 | VISYDGSNKYYADSVKG |
| 370 | VLCDR3 Ab34 | GAGRGYTRGPDGFDI |
| 371 | VLCDR1 Ab34 | TSSRSLLHSDGKTYVY |
| 372 | VLCDR2 Ab34 | ELSNRFS |
| 373 | VLCDR3 Ab34 | MQYVEAPLT |
| 374 | VH Ab34 | EVQLLESGGGVVQPGRSLRLSCAASGFTFSSYAMHWVRQAPGKGLEWVAVISYDGSNKY |
| | | YADSVKGRFTISRDNSKNTLSLQMNSLRVEDTAIYYCVRGAGRGYTRGPDGFDIWGQGT |
| | | MVTVSS |
| 375 | VL Ab34 | DIVMTQTPLSLSVTPGQPASISCTSSRSLLHSDGKTYVYWYVQKSGQPPQLLIYELSNR |
| | | FSGVPDRFSGSGSRTDFTLKISRVEAEDVGVYYCMQYVEAPLTFGGGTKVEIK |
| 376 | HC Ab34 | EVQLLESGGGVVQPGRSLRLSCAASGFTFSSYAMHWVRQAPGKGLEWVAVISYDGSNKY |
| | | YADSVKGRFTISRDNSKNTLSLQMNSLRVEDTAIYYCVRGAGRGYTRGPDGFDIWGQGT |
| | | MVTVSSKGPSVFPLAPSSRSTSESTAALGCLVKDYFPEPVTVSWNSGALTSGVHTFPAV |
| | | LQSSGLYSLSSVVTVPSSNFGTQTYTCNVDHKPSNTKVDKTVERKCCVECPPCPAPPVA |
| | | GPSVFLFPPKPKDTLMISRTPEVTCVVVDVSHEDPEVQFNWYVDGVEVHNAKTKPREEQ |
| | | FNSTFRVVSVLTVVHQDWLNGKEYKCKVSNKGLPAPIEKTISKTKGQPREPQVYTLPPS |
| | | REEMTKNQVSLTCLVKGFYPSDIAVEWESNGQPENNYKTTPPMLDSDGSFFLYSKLTVD |
| | | KSRWQQGNVFSCSVMHEALHNHYTQKSLSLSPG |
| 377 | LC Ab34 | DIVMTQTPLSLSVTPGQPASISCTSSRSLLHSDGKTYVYWYVQKSGQPPQLLIYELSNR |
| | | FSGVPDRFSGSGSRTDFTLKISRVEAEDVGVYYCMQYVEAPLTFGGGTKVEIKRTVAAP |
| | | SVFIFPPSDEQLKSGTASVVCLLNNFYPREAKVQWKVDNALQSGNSQESVTEQDSKDST |
| | | YSLSSTLTLSKADYEKHKVYACEVTHQGLSSPVTKSFNRGEC |
| 378 | VHCDR1 Ab35 | SYAMH |
| 379 | VHCDR2 Ab35 | VISYDGSNKYYADSVKG |
| 380 | VLCDR3 Ab35 | GAGRGYTNGPDGFDI |
| 381 | VLCDR1 Ab35 | TSSRSLLHSDGKTYVY |
| 382 | VLCDR2 Ab35 | ELSNRFS |
| 383 | VLCDR3 Ab35 | MQYVEAPLT |
| 384 | VH Ab35 | EVQLLESGGGVVQPGRSLRLSCAASGFTFSSYAMHWVRQAPGKGLEWVAVISYDGSNKY |
| | | YADSVKGRFTISRDNSKNTLSLQMNSLRVEDTAIYYCVRGAGRGYTNGPDGFDIWGQGT |
| | | MVTVSS |
| 385 | VL Ab35 | DIVMTQTPLSLSVTPGQPASISCTSSRSLLHSDGKTYVYWYVQKSGQPPQLLIYELSNR |
| | | FSGVPDRFSGSGSRTDFTLKISRVEAEDVGVYYCMQYVEAPLTFGGGTKVEIK |
| 386 | HC Ab35 | EVQLLESGGGVVQPGRSLRLSCAASGFTFSSYAMHWVRQAPGKGLEWVAVISYDGSNKY |
| | | YADSVKGRFTISRDNSKNTLSLQMNSLRVEDTAIYYCVRGAGRGYTNGPDGFDIWGQGT |
| | | MVTVSSKGPSVFPLAPSSRSTSESTAALGCLVKDYFPEPVTVSWNSGALTSGVHTFPAV |
| | | LQSSGLYSLSSVVTVPSSNFGTQTYTCNVDHKPSNTKVDKTVERKCCVECPPCPAPPVA |
| | | GPSVFLFPPKPKDTLMISRTPEVTCVVVDVSHEDPEVQFNWYVDGVEVHNAKTKPREEQ |
| | | FNSTFRVVSVLTVVHQDWLNGKEYKCKVSNKGLPAPIEKTISKTKGQPREPQVYTLPPS |
| | | REEMTKNQVSLTCLVKGFYPSDIAVEWESNGQPENNYKTTPPMLDSDGSFFLYSKLTVD |
| | | KSRWQQGNVFSCSVMHEALHNHYTQKSLSLSPG |
| 387 | LC Ab35 | DIVMTQTPLSLSVTPGQPASISCTSSRSLLHSDGKTYVYWYVQKSGQPPQLLIYELSNR |
| | | FSGVPDRFSGSGSRTDFTLKISRVEAEDVGVYYCMQYVEAPLTFGGGTKVEIKRTVAAP |
| | | SVFIFPPSDEQLKSGTASVVCLLNNFYPREAKVQWKVDNALQSGNSQESVTEQDSKDST |
| | | YSLSSTLTLSKADYEKHKVYACEVTHQGLSSPVTKSFNRGEC |
| 388 | VHCDR1 Ab36 | SYAMH |
| 389 | VHCDR2 Ab36 | VISYDGSNKYYADSVKG |
| 390 | VLCDR3 Ab36 | GAGRGFTYGPDGFDI |
| 391 | VLCDR1 Ab36 | RSSRSLLHSDGKTYVY |
| 392 | VLCDR2 Ab36 | ELSNRFS |
| 393 | VLCDR3 Ab36 | MQYIEAPLT |
| 394 | VH Ab36 | EVQLLESGGGVVQPGRSLRLSCAASGFTFSSYAMHWVRQAPGKGLEWVAVISYDGSNKY |
| | | YADSVKGRFTISRDNSKNTLSLQMNSLRVEDTAIYYCVRGAGRGFTYGPDGFDIWGQGT |
| | | MVTVSS |
| 395 | VL Ab36 | DIVMTQTPLSLSVTPGQPASISCRSSRSLLHSDGKTYVYWYVQKSGQPPQLLIYELSNR |
| | | FSGVPDRFSGSGSRTDFTLKISRVEAEDVGVYYCMQYIEAPLTFGGGTKVEIK |
| 396 | HC Ab36 | EVQLLESGGGVVQPGRSLRLSCAASGFTFSSYAMHWVRQAPGKGLEWVAVISYDGSNKY |
| | | YADSVKGRFTISRDNSKNTLSLQMNSLRVEDTAIYYCVRGAGRGFTYGPDGFDIWGQGT |
| | | MVTVSSKGPSVFPLAPSSRSTSESTAALGCLVKDYFPEPVTVSWNSGALTSGVHTFPAV |
| | | LQSSGLYSLSSVVTVPSSNFGTQTYTCNVDHKPSNTKVDKTVERKCCVECPPCPAPPVA |
| | | GPSVFLFPPKPKDTLMISRTPEVTCVVVDVSHEDPEVQFNWYVDGVEVHNAKTKPREEQ |
| | | FNSTFRVVSVLTVVHQDWLNGKEYKCKVSNKGLPAPIEKTISKTKGQPREPQVYTLPPS |
| | | REEMTKNQVSLTCLVKGFYPSDIAVEWESNGQPENNYKTTPPMLDSDGSFFLYSKLTVD |
| | | KSRWQQGNVFSCSVMHEALHNHYTQKSLSLSPG |
| 397 | LC Ab36 | DIVMTQTPLSLSVTPGQPASISCRSSRSLLHSDGKTYVYWYVQKSGQPPQLLIYELSNR |
| | | FSGVPDRFSGSGSRTDFTLKISRVEAEDVGVYYCMQYIEAPLTFGGGTKVEIKRTVAAP |
| | | SVFIFPPSDEQLKSGTASVVCLLNNFYPREAKVQWKVDNALQSGNSQESVTEQDSKDST |
| | | YSLSSTLTLSKADYEKHKVYACEVTHQGLSSPVTKSFNRGEC |
| 398 | VHCDR1 Ab37 | SYAMH |
| 399 | VHCDR2 Ab37 | VISYDGSNKYYADSVKG |
| 400 | VLCDR3 Ab37 | GAGRGLTYGPDGFDI |
| 401 | VLCDR1 Ab37 | RSSRSLLHSDGKTYVY |
| 402 | VLCDR2 Ab37 | ELSNRFS |
| 403 | VLCDR3 Ab37 | MQYIEAPLT |
| 404 | VH Ab37 | EVQLLESGGGVVQPGRSLRLSCAASGFTFSSYAMHWVRQAPGKGLEWVAVISYDGSNKY |
| | | YADSVKGRFTISRDNSKNTLSLQMNSLRVEDTAIYYCVRGAGRGLTYGPDGFDIWGQGT |
| | | MVTVSS |
| 405 | VL Ab37 | DIVMTQTPLSLSVTPGQPASISCRSSRSLLHSDGKTYVYWYVQKSGQPPQLLIYELSNR |
| | | FSGVPDRFSGSGSRTDFTLKISRVEAEDVGVYYCMQYIEAPLTFGGGTKVEIK |
| 406 | HC Ab37 | EVQLLESGGGVVQPGRSLRLSCAASGFTFSSYAMHWVRQAPGKGLEWVAVISYDGSNKY |
| | | YADSVKGRFTISRDNSKNTLSLQMNSLRVEDTAIYYCVRGAGRGLTYGPDGFDIWGQGT |
| | | MVTVSSKGPSVFPLAPSSRSTSESTAALGCLVKDYFPEPVTVSWNSGALTSGVHTFPAV |
| | | LQSSGLYSLSSVVTVPSSNFGTQTYTCNVDHKPSNTKVDKTVERKCCVECPPCPAPPVA |
| | | GPSVFLFPPKPKDTLMISRTPEVTCVVVDVSHEDPEVQFNWYVDGVEVHNAKTKPREEQ |
| | | FNSTFRVVSVLTVVHQDWLNGKEYKCKVSNKGLPAPIEKTISKTKGQPREPQVYTLPPS |
| | | REEMTKNQVSLTCLVKGFYPSDIAVEWESNGQPENNYKTTPPMLDSDGSFFLYSKLTVD |
| | | KSRWQQGNVFSCSVMHEALHNHYTQKSLSLSPG |
| 407 | LC Ab37 | DIVMTQTPLSLSVTPGQPASISCRSSRSLLHSDGKTYVYWYVQKSGQPPQLLIYELSNR |
| | | FSGVPDRFSGSGSRTDFTLKISRVEAEDVGVYYCMQYIEAPLTFGGGTKVEIKRTVAAP |
| | | SVFIFPPSDEQLKSGTASVVCLLNNFYPREAKVQWKVDNALQSGNSQESVTEQDSKDST |
| | | YSLSSTLTLSKADYEKHKVYACEVTHQGLSSPVTKSFNRGEC |
| 408 | VHCDR1 Ab38 | SYAMH |
| 409 | VHCDR2 Ab38 | VISYDGSNKYYADSVKG |
| 410 | VLCDR3 Ab38 | GAGQGYPYGPDGFDI |
| 411 | VLCDR1 Ab38 | RSSRSLLHSDGKTYVY |
| 412 | VLCDR2 Ab38 | ELSNRFS |
| 413 | VLCDR3 Ab38 | MQYIEAPLT |
| 414 | VH Ab38 | EVQLLESGGGVVQPGRSLRLSCAASGFTFSSYAMHWVRQAPGKGLEWVAVISYDGSNKY |
| | | YADSVKGRFTISRDNSKNTLSLQMNSLRVEDTAIYYCVRGAGQGYPYGPDGFDIWGQGT |
| | | MVTVSS |
| 415 | VL Ab38 | DIVMTQTPLSLSVTPGQPASISCRSSRSLLHSDGKTYVYWYVQKSGQPPQLLIYELSNR |
| | | FSGVPDRFSGSGSRTDFTLKISRVEAEDVGVYYCMQYIEAPLTFGGGTKVEIK |
| 416 | HC Ab38 | EVQLLESGGGVVQPGRSLRLSCAASGFTFSSYAMHWVRQAPGKGLEWVAVISYDGSNKY |
| | | YADSVKGRFTISRDNSKNTLSLQMNSLRVEDTAIYYCVRGAGQGYPYGPDGFDIWGQGT |
| | | MVTVSSKGPSVFPLAPSSRSTSESTAALGCLVKDYFPEPVTVSWNSGALTSGVHTFPAV |
| | | LQSSGLYSLSSVVTVPSSNFGTQTYTCNVDHKPSNTKVDKTVERKCCVECPPCPAPPVA |
| | | GPSVFLFPPKPKDTLMISRTPEVTCVVVDVSHEDPEVQFNWYVDGVEVHNAKTKPREEQ |
| | | FNSTFRVVSVLTVVHQDWLNGKEYKCKVSNKGLPAPIEKTISKTKGQPREPQVYTLPPS |
| | | REEMTKNQVSLTCLVKGFYPSDIAVEWESNGQPENNYKTTPPMLDSDGSFFLYSKLTVD |
| | | KSRWQQGNVFSCSVMHEALHNHYTQKSLSLSPG |
| 417 | LC Ab38 | DIVMTQTPLSLSVTPGQPASISCRSSRSLLHSDGKTYVYWYVQKSGQPPQLLIYELSNR |
| | | FSGVPDRFSGSGSRTDFTLKISRVEAEDVGVYYCMQYIEAPLTFGGGTKVEIKRTVAAP |
| | | SVFIFPPSDEQLKSGTASVVCLLNNFYPREAKVQWKVDNALQSGNSQESVTEQDSKDST |
| | | YSLSSTLTLSKADYEKHKVYACEVTHQGLSSPVTKSFNRGEC |
| 418 | VHCDR1 Ab39 | SYAMH |
| 419 | VHCDR2 Ab39 | VISYDGSNKYYADSVKG |
| 420 | VLCDR3 Ab39 | GAGTGFTYGPDGFDI |
| 421 | VLCDR1 Ab39 | RSSRSLLHSDGKTYVY |
| 422 | VLCDR2 Ab39 | ELSNRFS |
| 423 | VLCDR3 Ab39 | MQYIEAPLT |
| 424 | VH Ab39 | EVQLLESGGGVVQPGRSLRLSCAASGFTFSSYAMHWVRQAPGKGLEWVAVISYDGSNKY |
| | | YADSVKGRFTISRDNSKNTLSLQMNSLRVEDTAIYYCVRGAGTGFTYGPDGFDIWGQGT |
| | | MVTVSS |
| 425 | VL Ab39 | DIVMTQTPLSLSVTPGQPASISCRSSRSLLHSDGKTYVYWYVQKSGQPPQLLIYELSNR |
| | | FSGVPDRFSGSGSRTDFTLKISRVEAEDVGVYYCMQYIEAPLTFGGGTKVEIK |
| 426 | HC Ab39 | EVQLLESGGGVVQPGRSLRLSCAASGFTFSSYAMHWVRQAPGKGLEWVAVISYDGSNKY |
| | | YADSVKGRFTISRDNSKNTLSLQMNSLRVEDTAIYYCVRGAGTGFTYGPDGFDIWGQGT |
| | | MVTVSSKGPSVFPLAPSSRSTSESTAALGCLVKDYFPEPVTVSWNSGALTSGVHTFPAV |
| | | LQSSGLYSLSSVVTVPSSNFGTQTYTCNVDHKPSNTKVDKTVERKCCVECPPCPAPPVA |
| | | GPSVFLFPPKPKDTLMISRTPEVTCVVVDVSHEDPEVQFNWYVDGVEVHNAKTKPREEQ |
| | | FNSTFRVVSVLTVVHQDWLNGKEYKCKVSNKGLPAPIEKTISKTKGQPREPQVYTLPPS |
| | | REEMTKNQVSLTCLVKGFYPSDIAVEWESNGQPENNYKTTPPMLDSDGSFFLYSKLTVD |
| | | KSRWQQGNVFSCSVMHEALHNHYTQKSLSLSPG |
| 427 | LC Ab39 | DIVMTQTPLSLSVTPGQPASISCRSSRSLLHSDGKTYVYWYVQKSGQPPQLLIYELSNR |
| | | FSGVPDRFSGSGSRTDFTLKISRVEAEDVGVYYCMQYIEAPLTFGGGTKVEIKRTVAAP |
| | | SVFIFPPSDEQLKSGTASVVCLLNNFYPREAKVQWKVDNALQSGNSQESVTEQDSKDST |
| | | YSLSSTLTLSKADYEKHKVYACEVTHQGLSSPVTKSFNRGEC |
| 428 | VHCDR1 Ab40 | SYAMH |
| 429 | VHCDR2 Ab40 | VISYDGSNKYYADSVKG |
| 430 | VLCDR3 Ab40 | GAGMGLTYGPDGFDI |
| 431 | VLCDR1 Ab40 | RSSRSLLHSDGKTYVY |
| 432 | VLCDR2 Ab40 | ELSNRFS |
| 433 | VLCDR3 Ab40 | MQYIEAPLT |
| 434 | VH Ab40 | EVQLLESGGGVVQPGRSLRLSCAASGFTFSSYAMHWVRQAPGKGLEWVAVISYDGSNKY |
| | | YADSVKGRFTISRDNSKNTLSLQMNSLRVEDTAIYYCVRGAGMGLTYGPDGFDIWGQGT |
| | | MVTVSS |
| 435 | VL Ab40 | DIVMTQTPLSLSVTPGQPASISCRSSRSLLHSDGKTYVYWYVQKSGQPPQLLIYELSNR |
| | | FSGVPDRFSGSGSRTDFTLKISRVEAEDVGVYYCMQYIEAPLTFGGGTKVEIK |
| 436 | HC Ab40 | EVQLLESGGGVVQPGRSLRLSCAASGFTFSSYAMHWVRQAPGKGLEWVAVISYDGSNKY |
| | | YADSVKGRFTISRDNSKNTLSLQMNSLRVEDTAIYYCVRGAGMGLTYGPDGFDIWGQGT |
| | | MVTVSSKGPSVFPLAPSSRSTSESTAALGCLVKDYFPEPVTVSWNSGALTSGVHTFPAV |
| | | LQSSGLYSLSSVVTVPSSNFGTQTYTCNVDHKPSNTKVDKTVERKCCVECPPCPAPPVA |
| | | GPSVFLFPPKPKDTLMISRTPEVTCVVVDVSHEDPEVQFNWYVDGVEVHNAKTKPREEQ |
| | | FNSTFRVVSVLTVVHQDWLNGKEYKCKVSNKGLPAPIEKTISKTKGQPREPQVYTLPPS |
| | | REEMTKNQVSLTCLVKGFYPSDIAVEWESNGQPENNYKTTPPMLDSDGSFFLYSKLTVD |
| | | KSRWQQGNVFSCSVMHEALHNHYTQKSLSLSPG |
| 437 | LC Ab40 | DIVMTQTPLSLSVTPGQPASISCRSSRSLLHSDGKTYVYWYVQKSGQPPQLLIYELSNR |
| | | FSGVPDRFSGSGSRTDFTLKISRVEAEDVGVYYCMQYIEAPLTFGGGTKVEIKRTVAAP |
| | | SVFIFPPSDEQLKSGTASVVCLLNNFYPREAKVQWKVDNALQSGNSQESVTEQDSKDST |
| | | YSLSSTLTLSKADYEKHKVYACEVTHQGLSSPVTKSFNRGEC |
| 438 | VHCDR1 Ab41 | SYAMH |
| 439 | VHCDR2 Ab41 | VISYDGSNKYYADSVKG |
| 440 | VLCDR3 Ab41 | GAGLGFPYGPDGFDI |
| 441 | VLCDR1 Ab41 | RSSRSLLHSDGKTYVY |
| 442 | VLCDR2 Ab41 | ELSNRFS |
| 443 | VLCDR3 Ab41 | MQYIEAPLT |
| 444 | VH Ab41 | EVQLLESGGGVVQPGRSLRLSCAASGFTFSSYAMHWVRQAPGKGLEWVAVISYDGSNKY |
| | | YADSVKGRFTISRDNSKNTLSLQMNSLRVEDTAIYYCVRGAGLGFPYGPDGFDIWGQGT |
| | | MVTVSS |
| 445 | VL Ab41 | DIVMTQTPLSLSVTPGQPASISCRSSRSLLHSDGKTYVYWYVQKSGQPPQLLIYELSNR |
| | | FSGVPDRFSGSGSRTDFTLKISRVEAEDVGVYYCMQYIEAPLTFGGGTKVEIK |
| 446 | HC Ab41 | EVQLLESGGGVVQPGRSLRLSCAASGFTFSSYAMHWVRQAPGKGLEWVAVISYDGSNKY |
| | | YADSVKGRFTISRDNSKNTLSLQMNSLRVEDTAIYYCVRGAGLGFPYGPDGFDIWGQGT |
| | | MVTVSSKGPSVFPLAPSSRSTSESTAALGCLVKDYFPEPVTVSWNSGALTSGVHTFPAV |
| | | LQSSGLYSLSSVVTVPSSNFGTQTYTCNVDHKPSNTKVDKTVERKCCVECPPCPAPPVA |
| | | GPSVFLFPPKPKDTLMISRTPEVTCVVVDVSHEDPEVQFNWYVDGVEVHNAKTKPREEQ |
| | | FNSTFRVVSVLTVVHQDWLNGKEYKCKVSNKGLPAPIEKTISKTKGQPREPQVYTLPPS |
| | | REEMTKNQVSLTCLVKGFYPSDIAVEWESNGQPENNYKTTPPMLDSDGSFFLYSKLTVD |
| | | KSRWQQGNVFSCSVMHEALHNHYTQKSLSLSPG |
| 447 | LC Ab41 | DIVMTQTPLSLSVTPGQPASISCRSSRSLLHSDGKTYVYWYVQKSGQPPQLLIYELSNR |
| | | FSGVPDRFSGSGSRTDFTLKISRVEAEDVGVYYCMQYIEAPLTFGGGTKVEIKRTVAAP |
| | | SVFIFPPSDEQLKSGTASVVCLLNNFYPREAKVQWKVDNALQSGNSQESVTEQDSKDST |
| | | YSLSSTLTLSKADYEKHKVYACEVTHQGLSSPVTKSFNRGEC |
| 448 | VHCDR1 Ab42 | SYAMH |
| 449 | VHCDR2 Ab42 | VISYDGSNKYYADSVKG |
| 450 | VLCDR3 Ab42 | GAGLGWAYGPDGFDI |
| 451 | VLCDR1 Ab42 | RSSRSLLHSDGKTYVY |
| 452 | VLCDR2 Ab42 | ELSNRFS |
| 453 | VLCDR3 Ab42 | MQYIEAPLT |
| 454 | VH Ab42 | EVQLLESGGGVVQPGRSLRLSCAASGFTFSSYAMHWVRQAPGKGLEWVAVISYDGSNKY |
| | | YADSVKGRFTISRDNSKNTLSLQMNSLRVEDTAIYYCVRGAGLGWAYGPDGFDIWGQGT |
| | | MVTVSS |
| 455 | VL Ab42 | DIVMTQTPLSLSVTPGQPASISCRSSRSLLHSDGKTYVYWYVQKSGQPPQLLIYELSNR |
| | | FSGVPDRFSGSGSRTDFTLKISRVEAEDVGVYYCMQYIEAPLTFGGGTKVEIK |
| 456 | HC Ab42 | EVQLLESGGGVVQPGRSLRLSCAASGFTFSSYAMHWVRQAPGKGLEWVAVISYDGSNKY |
| | | YADSVKGRFTISRDNSKNTLSLQMNSLRVEDTAIYYCVRGAGLGWAYGPDGFDIWGQGT |
| | | MVTVSSKGPSVFPLAPSSRSTSESTAALGCLVKDYFPEPVTVSWNSGALTSGVHTFPAV |
| | | LQSSGLYSLSSVVTVPSSNFGTQTYTCNVDHKPSNTKVDKTVERKCCVECPPCPAPPVA |
| | | GPSVFLFPPKPKDTLMISRTPEVTCVVVDVSHEDPEVQFNWYVDGVEVHNAKTKPREEQ |
| | | FNSTFRVVSVLTVVHQDWLNGKEYKCKVSNKGLPAPIEKTISKTKGQPREPQVYTLPPS |
| | | REEMTKNQVSLTCLVKGFYPSDIAVEWESNGQPENNYKTTPPMLDSDGSFFLYSKLTVD |
| | | KSRWQQGNVFSCSVMHEALHNHYTQKSLSLSPG |
| 457 | LC Ab42 | DIVMTQTPLSLSVTPGQPASISCRSSRSLLHSDGKTYVYWYVQKSGQPPQLLIYELSNR |
| | | FSGVPDRFSGSGSRTDFTLKISRVEAEDVGVYYCMQYIEAPLTFGGGTKVEIKRTVAAP |
| | | SVFIFPPSDEQLKSGTASVVCLLNNFYPREAKVQWKVDNALQSGNSQESVTEQDSKDST |
| | | YSLSSTLTLSKADYEKHKVYACEVTHQGLSSPVTKSFNRGEC |
| 458 | VHCDR1 Ab43 | SYAMH |
| 459 | VHCDR2 Ab43 | VISYDGSNKYYADSVKG |
| 460 | VLCDR3 Ab43 | GAGRGYPYGPDGFDI |
| 461 | VLCDR1 Ab43 | RSSRSLLHSDGKTYVY |
| 462 | VLCDR2 Ab43 | ELSNRFS |
| 463 | VLCDR3 Ab43 | MQYIEAPLT |
| 464 | VH Ab43 | EVQLLESGGGVVQPGRSLRLSCAASGFTFSSYAMHWVRQAPGKGLEWVAVISYDGSNKY |
| | | YADSVKGRFTISRDNSKNTLSLQMNSLRVEDTAIYYCVRGAGRGYPYGPDGFDIWGQGT |
| | | MVTVSS |
| 465 | VL Ab43 | DIVMTQTPLSLSVTPGQPASISCRSSRSLLHSDGKTYVYWYVQKSGQPPQLLIYELSNR |
| | | FSGVPDRFSGSGSRTDFTLKISRVEAEDVGVYYCMQYIEAPLTFGGGTKVEIK |
| 466 | HC Ab43 | EVQLLESGGGVVQPGRSLRLSCAASGFTFSSYAMHWVRQAPGKGLEWVAVISYDGSNKY |
| | | YADSVKGRFTISRDNSKNTLSLQMNSLRVEDTAIYYCVRGAGRGYPYGPDGFDIWGQGT |
| | | MVTVSSKGPSVFPLAPSSRSTSESTAALGCLVKDYFPEPVTVSWNSGALTSGVHTFPAV |
| | | LQSSGLYSLSSVVTVPSSNFGTQTYTCNVDHKPSNTKVDKTVERKCCVECPPCPAPPVA |
| | | GPSVFLFPPKPKDTLMISRTPEVTCVVVDVSHEDPEVQFNWYVDGVEVHNAKTKPREEQ |
| | | FNSTFRVVSVLTVVHQDWLNGKEYKCKVSNKGLPAPIEKTISKTKGQPREPQVYTLPPS |
| | | REEMTKNQVSLTCLVKGFYPSDIAVEWESNGQPENNYKTTPPMLDSDGSFFLYSKLTVD |
| | | KSRWQQGNVFSCSVMHEALHNHYTQKSLSLSPG |
| 467 | LC Ab43 | DIVMTQTPLSLSVTPGQPASISCRSSRSLLHSDGKTYVYWYVQKSGQPPQLLIYELSNR |
| | | FSGVPDRFSGSGSRTDFTLKISRVEAEDVGVYYCMQYIEAPLTFGGGTKVEIKRTVAAP |
| | | SVFIFPPSDEQLKSGTASVVCLLNNFYPREAKVQWKVDNALQSGNSQESVTEQDSKDST |
| | | YSLSSTLTLSKADYEKHKVYACEVTHQGLSSPVTKSFNRGEC |
| 468 | VHCDR1 Ab44 | GYAMH |
| 469 | VHCDR2 Ab44 | VISYDGSNKYYADSVKG |
| 470 | VLCDR3 Ab44 | GAGRGLTYGPDGFDI |
| 471 | VLCDR1 Ab44 | RSSRSLLHSDGKTYVY |
| 472 | VLCDR2 Ab44 | ELSNRFS |
| 473 | VLCDR3 Ab44 | MQYIEAPLT |
| 474 | VH Ab44 | EVQLLESGGGVVQPGRSLRLSCAASGFDFAGYAMHWVRQAPGKGLEWVAVISYDGSNKY |
| | | YADSVKGRFTISRDNSKNTLSLQMNSLRVEDTAIYYCVRGAGRGLTYGPDGFDIWGQGT |
| | | MVTVSS |
| 475 | VL Ab44 | DIVMTQTPLSLSVTPGQPASISCRSSRSLLHSDGKTYVYWYVQKSGQPPQLLIYELSNR |
| | | FSGVPDRFSGSGSRTDFTLKISRVEAEDVGVYYCMQYIEAPLTFGGGTKVEIK |
| 476 | HC Ab44 | EVQLLESGGGVVQPGRSLRLSCAASGFDFAGYAMHWVRQAPGKGLEWVAVISYDGSNKY |
| | | YADSVKGRFTISRDNSKNTLSLQMNSLRVEDTAIYYCVRGAGRGLTYGPDGFDIWGQGT |
| | | MVTVSSKGPSVFPLAPSSRSTSESTAALGCLVKDYFPEPVTVSWNSGALTSGVHTFPAV |
| | | LQSSGLYSLSSVVTVPSSNFGTQTYTCNVDHKPSNTKVDKTVERKCCVECPPCPAPPVA |
| | | GPSVFLFPPKPKDTLMISRTPEVTCVVVDVSHEDPEVQFNWYVDGVEVHNAKTKPREEQ |
| | | FNSTFRVVSVLTVVHQDWLNGKEYKCKVSNKGLPAPIEKTISKTKGQPREPQVYTLPPS |
| | | REEMTKNQVSLTCLVKGFYPSDIAVEWESNGQPENNYKTTPPMLDSDGSFFLYSKLTVD |
| | | KSRWQQGNVFSCSVMHEALHNHYTQKSLSLSPG |
| 477 | LC Ab44 | DIVMTQTPLSLSVTPGQPASISCRSSRSLLHSDGKTYVYWYVQKSGQPPQLLIYELSNR |
| | | FSGVPDRFSGSGSRTDFTLKISRVEAEDVGVYYCMQYIEAPLTFGGGTKVEIKRTVAAP |
| | | SVFIFPPSDEQLKSGTASVVCLLNNFYPREAKVQWKVDNALQSGNSQESVTEQDSKDST |
| | | YSLSSTLTLSKADYEKHKVYACEVTHQGLSSPVTKSFNRGEC |
| 478 | VHCDR1 Ab45 | SYAMH |
| 479 | VHCDR2 Ab45 | VISYDGSNKYYADSVKG |
| 480 | VLCDR3 Ab45 | GAGLGLTYGPDGFDI |
| 481 | VLCDR1 Ab45 | RSSRSLLHSDGKTYVY |
| 482 | VLCDR2 Ab45 | ELSNRFS |
| 483 | VLCDR3 Ab45 | MQYIEAPLT |
| 484 | VH Ab45 | EVQLLESGGGVVQPGRSLRLSCAASGFTFSSYAMHWVRQAPGKGLEWVAVISYDGSNKY |
| | | YADSVKGRFTISRDNSKNTLSLQMNSLRVEDTAIYYCVRGAGLGLTYGPDGFDIWGQGT |
| | | MVTVSS |
| 485 | VL Ab45 | DIVMTQTPLSLSVTPGQPASISCRSSRSLLHSDGKTYVYWYVQKSGQPPQLLIYELSNR |
| | | FSGVPDRFSGSGSRTDFTLKISRVEAEDVGVYYCMQYIEAPLTFGGGTKVEIK |
| 486 | HC Ab45 | EVQLLESGGGVVQPGRSLRLSCAASGFTFSSYAMHWVRQAPGKGLEWVAVISYDGSNKY |
| | | YADSVKGRFTISRDNSKNTLSLQMNSLRVEDTAIYYCVRGAGLGLTYGPDGFDIWGQGT |
| | | MVTVSSKGPSVFPLAPSSRSTSESTAALGCLVKDYFPEPVTVSWNSGALTSGVHTFPAV |
| | | LQSSGLYSLSSVVTVPSSNFGTQTYTCNVDHKPSNTKVDKTVERKCCVECPPCPAPPVA |
| | | GPSVFLFPPKPKDTLMISRTPEVTCVVVDVSHEDPEVQFNWYVDGVEVHNAKTKPREEQ |
| | | FNSTFRVVSVLTVVHQDWLNGKEYKCKVSNKGLPAPIEKTISKTKGQPREPQVYTLPPS |
| | | REEMTKNQVSLTCLVKGFYPSDIAVEWESNGQPENNYKTTPPMLDSDGSFFLYSKLTVD |
| | | KSRWQQGNVFSCSVMHEALHNHYTQKSLSLSPG |
| 487 | LC Ab45 | DIVMTQTPLSLSVTPGQPASISCRSSRSLLHSDGKTYVYWYVQKSGQPPQLLIYELSNR |
| | | FSGVPDRFSGSGSRTDFTLKISRVEAEDVGVYYCMQYIEAPLTFGGGTKVEIKRTVAAP |
| | | SVFIFPPSDEQLKSGTASVVCLLNNFYPREAKVQWKVDNALQSGNSQESVTEQDSKDST |
| | | YSLSSTLTLSKADYEKHKVYACEVTHQGLSSPVTKSFNRGEC |
| 488 | VHCDR1 Ab46 | SYAMH |
| 489 | VHCDR2 Ab46 | VISYDGSNKYYADSVKG |
| 490 | VLCDR3 Ab46 | GAGLGYPYGPDGFDI |
| 491 | VLCDR1 Ab46 | RSSRSLLHSDGKTYVY |
| 492 | VLCDR2 Ab46 | ELSNRFS |
| 493 | VLCDR3 Ab46 | MQYIEAPLT |
| 494 | VH Ab46 | EVQLLESGGGVVQPGRSLRLSCAASGFTFSSYAMHWVRQAPGKGLEWVAVISYDGSNKY |
| | | YADSVKGRFTISRDNSKNTLSLQMNSLRVEDTAIYYCVRGAGLGYPYGPDGFDIWGQGT |
| | | MVTVSS |
| 495 | VL Ab46 | DIVMTQTPLSLSVTPGQPASISCRSSRSLLHSDGKTYVYWYVQKSGQPPQLLIYELSNR |
| | | FSGVPDRFSGSGSRTDFTLKISRVEAEDVGVYYCMQYIEAPLTFGGGTKVEIK |
| 496 | HC Ab46 | EVQLLESGGGVVQPGRSLRLSCAASGFTFSSYAMHWVRQAPGKGLEWVAVISYDGSNKY |
| | | YADSVKGRFTISRDNSKNTLSLQMNSLRVEDTAIYYCVRGAGLGYPYGPDGFDIWGQGT |
| | | MVTVSSKGPSVFPLAPSSRSTSESTAALGCLVKDYFPEPVTVSWNSGALTSGVHTFPAV |
| | | LQSSGLYSLSSVVTVPSSNFGTQTYTCNVDHKPSNTKVDKTVERKCCVECPPCPAPPVA |
| | | GPSVFLFPPKPKDTLMISRTPEVTCVVVDVSHEDPEVQFNWYVDGVEVHNAKTKPREEQ |
| | | FNSTFRVVSVLTVVHQDWLNGKEYKCKVSNKGLPAPIEKTISKTKGQPREPQVYTLPPS |
| | | REEMTKNQVSLTCLVKGFYPSDIAVEWESNGQPENNYKTTPPMLDSDGSFFLYSKLTVD |
| | | KSRWQQGNVFSCSVMHEALHNHYTQKSLSLSPG |
| 497 | LC Ab46 | DIVMTQTPLSLSVTPGQPASISCRSSRSLLHSDGKTYVYWYVQKSGQPPQLLIYELSNR |
| | | FSGVPDRFSGSGSRTDFTLKISRVEAEDVGVYYCMQYIEAPLTFGGGTKVEIKRTVAAP |
| | | SVFIFPPSDEQLKSGTASVVCLLNNFYPREAKVQWKVDNALQSGNSQESVTEQDSKDST |
| | | YSLSSTLTLSKADYEKHKVYACEVTHQGLSSPVTKSFNRGEC |
| 498 | VHCDR1 Ab47 | SYAMH |
| 499 | VHCDR2 Ab47 | VISYDGSNKYYADSVKG |
| 500 | VLCDR3 Ab47 | GAGRGYPHGPDGFDI |
| 501 | VLCDR1 Ab47 | RSSRSLLHSDGKTYVY |
| 502 | VLCDR2 Ab47 | ELSNRFS |
| 503 | VLCDR3 Ab47 | MQYIEAPLT |
| 504 | VH Ab47 | EVQLLESGGGVVQPGRSLRLSCAASGFTFSSYAMHWVRQAPGKGLEWVAVISYDGSNKY |
| | | YADSVKGRFTISRDNSKNTLSLQMNSLRVEDTAIYYCVRGAGRGYPHGPDGFDIWGQGT |
| | | MVTVSS |
| 505 | VL Ab47 | DIVMTQTPLSLSVTPGQPASISCRSSRSLLHSDGKTYVYWYVQKSGQPPQLLIYELSNR |
| | | FSGVPDRFSGSGSRTDFTLKISRVEAEDVGVYYCMQYIEAPLTFGGGTKVEIK |
| 506 | HC Ab47 | EVQLLESGGGVVQPGRSLRLSCAASGFTFSSYAMHWVRQAPGKGLEWVAVISYDGSNKY |
| | | YADSVKGRFTISRDNSKNTLSLQMNSLRVEDTAIYYCVRGAGRGYPHGPDGFDIWGQGT |
| | | MVTVSSKGPSVFPLAPSSRSTSESTAALGCLVKDYFPEPVTVSWNSGALTSGVHTFPAV |
| | | LQSSGLYSLSSVVTVPSSNFGTQTYTCNVDHKPSNTKVDKTVERKCCVECPPCPAPPVA |
| | | GPSVFLFPPKPKDTLMISRTPEVTCVVVDVSHEDPEVQFNWYVDGVEVHNAKTKPREEQ |
| | | FNSTFRVVSVLTVVHQDWLNGKEYKCKVSNKGLPAPIEKTISKTKGQPREPQVYTLPPS |
| | | REEMTKNQVSLTCLVKGFYPSDIAVEWESNGQPENNYKTTPPMLDSDGSFFLYSKLTVD |
| | | KSRWQQGNVFSCSVMHEALHNHYTQKSLSLSPG |
| 507 | LC Ab47 | DIVMTQTPLSLSVTPGQPASISCRSSRSLLHSDGKTYVYWYVQKSGQPPQLLIYELSNR |
| | | FSGVPDRFSGSGSRTDFTLKISRVEAEDVGVYYCMQYIEAPLTFGGGTKVEIKRTVAAP |
| | | SVFIFPPSDEQLKSGTASVVCLLNNFYPREAKVQWKVDNALQSGNSQESVTEQDSKDST |
| | | YSLSSTLTLSKADYEKHKVYACEVTHQGLSSPVTKSFNRGEC |
| 508 | VHCDR1 Ab48 | SYAMH |
| 509 | VHCDR2 Ab48 | VISYDGSNKYYADSVKG |
| 510 | VLCDR3 Ab48 | GAGIGYPHGPDGFDI |
| 511 | VLCDR1 Ab48 | RSSRSLLHSDGKTYVY |
| 512 | VLCDR2 Ab48 | ELSNRFS |
| 513 | VLCDR3 Ab48 | MQYIEAPLT |
| 514 | VH Ab48 | EVQLLESGGGVVQPGRSLRLSCAASGFTFSSYAMHWVRQAPGKGLEWVAVISYDGSNKY |
| | | YADSVKGRFTISRDNSKNTLSLQMNSLRVEDTAIYYCVRGAGIGYPHGPDGFDIWGQGT |
| | | MVTVSS |
| 515 | VL Ab48 | DIVMTQTPLSLSVTPGQPASISCRSSRSLLHSDGKTYVYWYVQKSGQPPQLLIYELSNR |
| | | FSGVPDRFSGSGSRTDFTLKISRVEAEDVGVYYCMQYIEAPLTFGGGTKVEIK |
| 516 | HC Ab48 | EVQLLESGGGVVQPGRSLRLSCAASGFTFSSYAMHWVRQAPGKGLEWVAVISYDGSNKY |
| | | YADSVKGRFTISRDNSKNTLSLQMNSLRVEDTAIYYCVRGAGIGYPHGPDGFDIWGQGT |
| | | MVTVSSKGPSVFPLAPSSRSTSESTAALGCLVKDYFPEPVTVSWNSGALTSGVHTFPAV |
| | | LQSSGLYSLSSVVTVPSSNFGTQTYTCNVDHKPSNTKVDKTVERKCCVECPPCPAPPVA |
| | | GPSVFLFPPKPKDTLMISRTPEVTCVVVDVSHEDPEVQFNWYVDGVEVHNAKTKPREEQ |
| | | FNSTFRVVSVLTVVHQDWLNGKEYKCKVSNKGLPAPIEKTISKTKGQPREPQVYTLPPS |
| | | REEMTKNQVSLTCLVKGFYPSDIAVEWESNGQPENNYKTTPPMLDSDGSFFLYSKLTVD |
| | | KSRWQQGNVFSCSVMHEALHNHYTQKSLSLSPG |
| 517 | LC Ab48 | DIVMTQTPLSLSVTPGQPASISCRSSRSLLHSDGKTYVYWYVQKSGQPPQLLIYELSNR |
| | | FSGVPDRFSGSGSRTDFTLKISRVEAEDVGVYYCMQYIEAPLTFGGGTKVEIKRTVAAP |
| | | SVFIFPPSDEQLKSGTASVVCLLNNFYPREAKVQWKVDNALQSGNSQESVTEQDSKDST |
| | | YSLSSTLTLSKADYEKHKVYACEVTHQGLSSPVTKSFNRGEC |
| 518 | VHCDR1 Ab49 | SYAMH |
| 519 | VHCDR2 Ab49 | VISYDGSNKYYADSVKG |
| 520 | VLCDR3 Ab49 | GAGRGYPYGPDGFDI |
| 521 | VLCDR1 Ab49 | RSSRSLLHSDGKTYVY |
| 522 | VLCDR2 Ab49 | ELSNRFS |
| 523 | VLCDR3 Ab49 | MQYIEAPLT |
| 524 | VH Ab49 | EVQLLESGGGVVQPGRSLRLSCAASGFTFSSYAMHWVRQAPGKGLEWVAVISYDGSNKY |
| | | YADSVKGRFTISRDNSKNTLSLQMNSLRVEDTAIYYCVRGAGRGYPYGPDGFDIWGQGT |
| | | MVTVSS |
| 525 | VL Ab49 | DIVMTQTPLSLSVTPGQPASISCRSSRSLLHSDGKTYVYWYVQKSGQPPQLLIYELSNR |
| | | FSGVPDRFSGSGSRTDFTLKISRVEAEDVGVYYCMQYIEAPLTFGGGTKVEIK |
| 526 | HC Ab49 | EVQLLESGGGVVQPGRSLRLSCAASGFTFSSYAMHWVRQAPGKGLEWVAVISYDGSNKY |
| | | YADSVKGRFTISRDNSKNTLSLQMNSLRVEDTAIYYCVRGAGRGYPYGPDGFDIWGQGT |
| | | MVTVSSKGPSVFPLAPSSRSTSESTAALGCLVKDYFPEPVTVSWNSGALTSGVHTFPAV |
| | | LQSSGLYSLSSVVTVPSSNFGTQTYTCNVDHKPSNTKVDKTVERKCCVECPPCPAPPVA |
| | | GPSVFLFPPKPKDTLMISRTPEVTCVVVDVSHEDPEVQFNWYVDGVEVHNAKTKPREEQ |
| | | FNSTFRVVSVLTVVHQDWLNGKEYKCKVSNKGLPAPIEKTISKTKGQPREPQVYTLPPS |
| | | REEMTKNQVSLTCLVKGFYPSDIAVEWESNGQPENNYKTTPPMLDSDGSFFLYSKLTVD |
| | | KSRWQQGNVFSCSVMHEALHNHYTQKSLSLSPG |
| 527 | LC Ab49 | DIVMTQTPLSLSVTPGQPASISCRSSRSLLHSDGKTYVYWYVQKSGQPPQLLIYELSNR |
| | | FSGVPDRFSGSGSRTDFTLKISRVEAEDVGVYYCMQYIEAPLTFGGGTKVEIKRTVAAP |
| | | SVFIFPPSDEQLKSGTASVVCLLNNFYPREAKVQWKVDNALQSGNSQESVTEQDSKDST |
| | | YSLSSTLTLSKADYEKHKVYACEVTHQGLSSPVTKSFNRGEC |
| 528 | VHCDR1 Ab50 | SYAMH |
| 529 | VHCDR2 Ab50 | VISYDGSNKYYADSVKG |
| 530 | VLCDR3 Ab50 | GAGLGFPFGPDGFDI |
| 531 | VLCDR1 Ab50 | RSSRSLLHSDGKTYVY |
| 532 | VLCDR2 Ab50 | ELSNRFS |
| 533 | VLCDR3 Ab50 | MQYIEAPLT |
| 534 | VH Ab50 | EVQLLESGGGVVQPGRSLRLSCAASGFTFSSYAMHWVRQAPGKGLEWVAVISYDGSNKY |
| | | YADSVKGRFTISRDNSKNTLSLQMNSLRVEDTAIYYCVRGAGLGFPFGPDGFDIWGQGT |
| | | MVTVSS |
| 535 | VL Ab50 | DIVMTQTPLSLSVTPGQPASISCRSSRSLLHSDGKTYVYWYVQKSGQPPQLLIYELSNR |
| | | FSGVPDRFSGSGSRTDFTLKISRVEAEDVGVYYCMQYIEAPLTFGGGTKVEIK |
| 536 | HC Ab50 | EVQLLESGGGVVQPGRSLRLSCAASGFTFSSYAMHWVRQAPGKGLEWVAVISYDGSNKY |
| | | YADSVKGRFTISRDNSKNTLSLQMNSLRVEDTAIYYCVRGAGLGFPFGPDGFDIWGQGT |
| | | MVTVSSKGPSVFPLAPSSRSTSESTAALGCLVKDYFPEPVTVSWNSGALTSGVHTFPAV |
| | | LQSSGLYSLSSVVTVPSSNFGTQTYTCNVDHKPSNTKVDKTVERKCCVECPPCPAPPVA |
| | | GPSVFLFPPKPKDTLMISRTPEVTCVVVDVSHEDPEVQFNWYVDGVEVHNAKTKPREEQ |
| | | FNSTFRVVSVLTVVHQDWLNGKEYKCKVSNKGLPAPIEKTISKTKGQPREPQVYTLPPS |
| | | REEMTKNQVSLTCLVKGFYPSDIAVEWESNGQPENNYKTTPPMLDSDGSFFLYSKLTVD |
| | | KSRWQQGNVFSCSVMHEALHNHYTQKSLSLSPG |
| 537 | LC Ab50 | DIVMTQTPLSLSVTPGQPASISCRSSRSLLHSDGKTYVYWYVQKSGQPPQLLIYELSNR |
| | | FSGVPDRFSGSGSRTDFTLKISRVEAEDVGVYYCMQYIEAPLTFGGGTKVEIKRTVAAP |
| | | SVFIFPPSDEQLKSGTASVVCLLNNFYPREAKVQWKVDNALQSGNSQESVTEQDSKDST |
| | | YSLSSTLTLSKADYEKHKVYACEVTHQGLSSPVTKSFNRGEC |
| 538 | VHCDR1 Ab51 | SYAMH |
| 539 | VHCDR2 Ab51 | VISYDGSNKYYADSVKG |
| 540 | VLCDR3 Ab51 | GAGRGFPYGPDGFDI |
| 541 | VLCDR1 Ab51 | RSSRSLLHSDGKTYVY |
| 542 | VLCDR2 Ab51 | ELSNRFS |
| 543 | VLCDR3 Ab51 | MQYIEAPLT |
| 544 | VH Ab51 | EVQLLESGGGVVQPGRSLRLSCAASGFTFSSYAMHWVRQAPGKGLEWVAVISYDGSNKY |
| | | YADSVKGRFTISRDNSKNTLSLQMNSLRVEDTAIYYCVRGAGRGFPYGPDGFDIWGQGT |
| | | MVTVSS |
| 545 | VL Ab51 | DIVMTQTPLSLSVTPGQPASISCRSSRSLLHSDGKTYVYWYVQKSGQPPQLLIYELSNR |
| | | FSGVPDRFSGSGSRTDFTLKISRVEAEDVGVYYCMQYIEAPLTFGGGTKVEIK |
| 546 | HC Ab51 | EVQLLESGGGVVQPGRSLRLSCAASGFTFSSYAMHWVRQAPGKGLEWVAVISYDGSNKY |
| | | YADSVKGRFTISRDNSKNTLSLQMNSLRVEDTAIYYCVRGAGRGFPYGPDGFDIWGQGT |
| | | MVTVSSKGPSVFPLAPSSRSTSESTAALGCLVKDYFPEPVTVSWNSGALTSGVHTFPAV |
| | | LQSSGLYSLSSVVTVPSSNFGTQTYTCNVDHKPSNTKVDKTVERKCCVECPPCPAPPVA |
| | | GPSVFLFPPKPKDTLMISRTPEVTCVVVDVSHEDPEVQFNWYVDGVEVHNAKTKPREEQ |
| | | FNSTFRVVSVLTVVHQDWLNGKEYKCKVSNKGLPAPIEKTISKTKGQPREPQVYTLPPS |
| | | REEMTKNQVSLTCLVKGFYPSDIAVEWESNGQPENNYKTTPPMLDSDGSFFLYSKLTVD |
| | | KSRWQQGNVFSCSVMHEALHNHYTQKSLSLSPG |
| 547 | LC Ab51 | DIVMTQTPLSLSVTPGQPASISCRSSRSLLHSDGKTYVYWYVQKSGQPPQLLIYELSNR |
| | | FSGVPDRFSGSGSRTDFTLKISRVEAEDVGVYYCMQYIEAPLTFGGGTKVEIKRTVAAP |
| | | SVFIFPPSDEQLKSGTASVVCLLNNFYPREAKVQWKVDNALQSGNSQESVTEQDSKDST |
| | | YSLSSTLTLSKADYEKHKVYACEVTHQGLSSPVTKSFNRGEC |
| 548 | VHCDR1 Ab52 | SYAMH |
| 549 | VHCDR2 Ab52 | VISYDGSNKYYADSVKG |
| 550 | VLCDR3 Ab52 | GAGLGYPNGPDGFDI |
| 551 | VLCDR1 Ab52 | RSSRSLLHSDGKTYVY |
| 552 | VLCDR2 Ab52 | ELSNRFS |
| 553 | VLCDR3 Ab52 | MQYIEAPLT |
| 554 | VH Ab52 | EVQLLESGGGVVQPGRSLRLSCAASGFTFSSYAMHWVRQAPGKGLEWVAVISYDGSNKY |
| | | YADSVKGRFTISRDNSKNTLSLQMNSLRVEDTAIYYCVRGAGLGYPNGPDGFDIWGQGT |
| | | MVTVSS |
| 555 | VL Ab52 | DIVMTQTPLSLSVTPGQPASISCRSSRSLLHSDGKTYVYWYVQKSGQPPQLLIYELSNR |
| | | FSGVPDRFSGSGSRTDFTLKISRVEAEDVGVYYCMQYIEAPLTFGGGTKVEIK |
| 556 | HC Ab52 | EVQLLESGGGVVQPGRSLRLSCAASGFTFSSYAMHWVRQAPGKGLEWVAVISYDGSNKY |
| | | YADSVKGRFTISRDNSKNTLSLQMNSLRVEDTAIYYCVRGAGLGYPNGPDGFDIWGQGT |
| | | MVTVSSKGPSVFPLAPSSRSTSESTAALGCLVKDYFPEPVTVSWNSGALTSGVHTFPAV |
| | | LQSSGLYSLSSVVTVPSSNFGTQTYTCNVDHKPSNTKVDKTVERKCCVECPPCPAPPVA |
| | | GPSVFLFPPKPKDTLMISRTPEVTCVVVDVSHEDPEVQFNWYVDGVEVHNAKTKPREEQ |
| | | FNSTFRVVSVLTVVHQDWLNGKEYKCKVSNKGLPAPIEKTISKTKGQPREPQVYTLPPS |
| | | REEMTKNQVSLTCLVKGFYPSDIAVEWESNGQPENNYKTTPPMLDSDGSFFLYSKLTVD |
| | | KSRWQQGNVFSCSVMHEALHNHYTQKSLSLSPG |
| 557 | LC Ab52 | DIVMTQTPLSLSVTPGQPASISCRSSRSLLHSDGKTYVYWYVQKSGQPPQLLIYELSNR |
| | | FSGVPDRFSGSGSRTDFTLKISRVEAEDVGVYYCMQYIEAPLTFGGGTKVEIKRTVAAP |
| | | SVFIFPPSDEQLKSGTASVVCLLNNFYPREAKVQWKVDNALQSGNSQESVTEQDSKDST |
| | | YSLSSTLTLSKADYEKHKVYACEVTHQGLSSPVTKSFNRGEC |
| 558 | VHCDR1 Ab53 | SYAMH |
| 559 | VHCDR2 Ab53 | VISYDGSNKYYADSVKG |
| 560 | VLCDR3 Ab53 | GAGQGFPYGPDGFDI |
| 561 | VLCDR1 Ab53 | RSSRSLLHSDGKTYVY |
| 562 | VLCDR2 Ab53 | ELSNRFS |
| 563 | VLCDR3 Ab53 | MQYIEAPLT |
| 564 | VH Ab53 | EVQLLESGGGVVQPGRSLRLSCAASGFTFSSYAMHWVRQAPGKGLEWVAVISYDGSNKY |
| | | YADSVKGRFTISRDNSKNTLSLQMNSLRVEDTAIYYCVRGAGQGFPYGPDGFDIWGQGT |
| | | MVTVSS |
| 565 | VL Ab53 | DIVMTQTPLSLSVTPGQPASISCRSSRSLLHSDGKTYVYWYVQKSGQPPQLLIYELSNR |
| | | FSGVPDRFSGSGSRTDFTLKISRVEAEDVGVYYCMQYIEAPLTFGGGTKVEIK |
| 566 | HC Ab53 | EVQLLESGGGVVQPGRSLRLSCAASGFTFSSYAMHWVRQAPGKGLEWVAVISYDGSNKY |
| | | YADSVKGRFTISRDNSKNTLSLQMNSLRVEDTAIYYCVRGAGQGFPYGPDGFDIWGQGT |
| | | MVTVSSKGPSVFPLAPSSRSTSESTAALGCLVKDYFPEPVTVSWNSGALTSGVHTFPAV |
| | | LQSSGLYSLSSVVTVPSSNFGTQTYTCNVDHKPSNTKVDKTVERKCCVECPPCPAPPVA |
| | | GPSVFLFPPKPKDTLMISRTPEVTCVVVDVSHEDPEVQFNWYVDGVEVHNAKTKPREEQ |
| | | FNSTFRVVSVLTVVHQDWLNGKEYKCKVSNKGLPAPIEKTISKTKGQPREPQVYTLPPS |
| | | REEMTKNQVSLTCLVKGFYPSDIAVEWESNGQPENNYKTTPPMLDSDGSFFLYSKLTVD |
| | | KSRWQQGNVFSCSVMHEALHNHYTQKSLSLSPG |
| 567 | LC Ab53 | DIVMTQTPLSLSVTPGQPASISCRSSRSLLHSDGKTYVYWYVQKSGQPPQLLIYELSNR |
| | | FSGVPDRFSGSGSRTDFTLKISRVEAEDVGVYYCMQYIEAPLTFGGGTKVEIKRTVAAP |
| | | SVFIFPPSDEQLKSGTASVVCLLNNFYPREAKVQWKVDNALQSGNSQESVTEQDSKDST |
| | | YSLSSTLTLSKADYEKHKVYACEVTHQGLSSPVTKSFNRGEC |
| 568 | VHCDR1 Ab54 | SYAMH |
| 569 | VHCDR2 Ab54 | VISYDGSNKYYADSVKG |
| 570 | VLCDR3 Ab54 | GAGQGYPYGPDGFDI |
| 571 | VLCDR1 Ab54 | TSSRSLLHSDGKTYVY |
| 572 | VLCDR2 Ab54 | ELSNRFS |
| 573 | VLCDR3 Ab54 | MQYIEAPLT |
| 574 | VH Ab54 | EVQLLESGGGVVQPGRSLRLSCAASGFTFSSYAMHWVRQAPGKGLEWVAVISYDGSNKY |
| | | YADSVKGRFTISRDNSKNTLSLQMNSLRVEDTAIYYCVRGAGQGYPYGPDGFDIWGQGT |
| | | MVTVSS |
| 575 | VL Ab54 | DIVMTQTPLSLSVTPGQPASISCTSSRSLLHSDGKTYVYWYVQKSGQPPQLLIYELSNR |
| | | FSGVPDRFSGSGSRTDFTLKISRVEAEDVGVYYCMQYIEAPLTFGGGTKVEIK |
| 576 | HC Ab54 | EVQLLESGGGVVQPGRSLRLSCAASGFTFSSYAMHWVRQAPGKGLEWVAVISYDGSNKY |
| | | YADSVKGRFTISRDNSKNTLSLQMNSLRVEDTAIYYCVRGAGQGYPYGPDGFDIWGQGT |
| | | MVTVSSKGPSVFPLAPSSRSTSESTAALGCLVKDYFPEPVTVSWNSGALTSGVHTFPAV |
| | | LQSSGLYSLSSVVTVPSSNFGTQTYTCNVDHKPSNTKVDKTVERKCCVECPPCPAPPVA |
| | | GPSVFLFPPKPKDTLMISRTPEVTCVVVDVSHEDPEVQFNWYVDGVEVHNAKTKPREEQ |
| | | FNSTFRVVSVLTVVHQDWLNGKEYKCKVSNKGLPAPIEKTISKTKGQPREPQVYTLPPS |
| | | REEMTKNQVSLTCLVKGFYPSDIAVEWESNGQPENNYKTTPPMLDSDGSFFLYSKLTVD |
| | | KSRWQQGNVFSCSVMHEALHNHYTQKSLSLSPG |
| 577 | LC Ab54 | DIVMTQTPLSLSVTPGQPASISCTSSRSLLHSDGKTYVYWYVQKSGQPPQLLIYELSNR |
| | | FSGVPDRFSGSGSRTDFTLKISRVEAEDVGVYYCMQYIEAPLTFGGGTKVEIKRTVAAP |
| | | SVFIFPPSDEQLKSGTASVVCLLNNFYPREAKVQWKVDNALQSGNSQESVTEQDSKDST |
| | | YSLSSTLTLSKADYEKHKVYACEVTHQGLSSPVTKSFNRGEC |
| 578 | VHCDR1 Ab55 | SYAMH |
| 579 | VHCDR2 Ab55 | VISYDGSNKYYADSVKG |
| 580 | VLCDR3 Ab55 | GAGTGFTYGPDGFDI |
| 581 | VLCDR1 Ab55 | TSSRSLLHSDGKTYVY |
| 582 | VLCDR2 Ab55 | ELSNRFS |
| 583 | VLCDR3 Ab55 | MQYIEAPLT |
| 584 | VH Ab55 | EVQLLESGGGVVQPGRSLRLSCAASGFTFSSYAMHWVRQAPGKGLEWVAVISYDGSNKY |
| | | YADSVKGRFTISRDNSKNTLSLQMNSLRVEDTAIYYCVRGAGTGFTYGPDGFDIWGQGT |
| | | MVTVSS |
| 585 | VL Ab55 | DIVMTQTPLSLSVTPGQPASISCTSSRSLLHSDGKTYVYWYVQKSGQPPQLLIYELSNR |
| | | FSGVPDRFSGSGSRTDFTLKISRVEAEDVGVYYCMQYIEAPLTFGGGTKVEIK |
| 586 | HC Ab55 | EVQLLESGGGVVQPGRSLRLSCAASGFTFSSYAMHWVRQAPGKGLEWVAVISYDGSNKY |
| | | YADSVKGRFTISRDNSKNTLSLQMNSLRVEDTAIYYCVRGAGTGFTYGPDGFDIWGQGT |
| | | MVTVSSKGPSVFPLAPSSRSTSESTAALGCLVKDYFPEPVTVSWNSGALTSGVHTFPAV |
| | | LQSSGLYSLSSVVTVPSSNFGTQTYTCNVDHKPSNTKVDKTVERKCCVECPPCPAPPVA |
| | | GPSVFLFPPKPKDTLMISRTPEVTCVVVDVSHEDPEVQFNWYVDGVEVHNAKTKPREEQ |
| | | FNSTFRVVSVLTVVHQDWLNGKEYKCKVSNKGLPAPIEKTISKTKGQPREPQVYTLPPS |
| | | REEMTKNQVSLTCLVKGFYPSDIAVEWESNGQPENNYKTTPPMLDSDGSFFLYSKLTVD |
| | | KSRWQQGNVFSCSVMHEALHNHYTQKSLSLSPG |
| 587 | LC Ab55 | DIVMTQTPLSLSVTPGQPASISCTSSRSLLHSDGKTYVYWYVQKSGQPPQLLIYELSNR |
| | | FSGVPDRFSGSGSRTDFTLKISRVEAEDVGVYYCMQYIEAPLTFGGGTKVEIKRTVAAP |
| | | SVFIFPPSDEQLKSGTASVVCLLNNFYPREAKVQWKVDNALQSGNSQESVTEQDSKDST |
| | | YSLSSTLTLSKADYEKHKVYACEVTHQGLSSPVTKSFNRGEC |
| 588 | VHCDR1 Ab56 | SYAMH |
| 589 | VHCDR2 Ab56 | VISYDGSNKYYADSVKG |
| 590 | VLCDR3 Ab56 | GAGMGLTYGPDGFDI |
| 591 | VLCDR1 Ab56 | TSSRSLLHSDGKTYVY |
| 592 | VLCDR2 Ab56 | ELSNRFS |
| 593 | VLCDR3 Ab56 | MQYIEAPLT |
| 594 | VH Ab56 | EVQLLESGGGVVQPGRSLRLSCAASGFTFSSYAMHWVRQAPGKGLEWVAVISYDGSNKY |
| | | YADSVKGRFTISRDNSKNTLSLQMNSLRVEDTAIYYCVRGAGMGLTYGPDGFDIWGQGT |
| | | MVTVSS |
| 595 | VL Ab56 | DIVMTQTPLSLSVTPGQPASISCTSSRSLLHSDGKTYVYWYVQKSGQPPQLLIYELSNR |
| | | FSGVPDRFSGSGSRTDFTLKISRVEAEDVGVYYCMQYIEAPLTFGGGTKVEIK |
| 596 | HC Ab56 | EVQLLESGGGVVQPGRSLRLSCAASGFTFSSYAMHWVRQAPGKGLEWVAVISYDGSNKY |
| | | YADSVKGRFTISRDNSKNTLSLQMNSLRVEDTAIYYCVRGAGMGLTYGPDGFDIWGQGT |
| | | MVTVSSKGPSVFPLAPSSRSTSESTAALGCLVKDYFPEPVTVSWNSGALTSGVHTFPAV |
| | | LQSSGLYSLSSVVTVPSSNFGTQTYTCNVDHKPSNTKVDKTVERKCCVECPPCPAPPVA |
| | | GPSVFLFPPKPKDTLMISRTPEVTCVVVDVSHEDPEVQFNWYVDGVEVHNAKTKPREEQ |
| | | FNSTFRVVSVLTVVHQDWLNGKEYKCKVSNKGLPAPIEKTISKTKGQPREPQVYTLPPS |
| | | REEMTKNQVSLTCLVKGFYPSDIAVEWESNGQPENNYKTTPPMLDSDGSFFLYSKLTVD |
| | | KSRWQQGNVFSCSVMHEALHNHYTQKSLSLSPG |
| 597 | LC Ab56 | DIVMTQTPLSLSVTPGQPASISCTSSRSLLHSDGKTYVYWYVQKSGQPPQLLIYELSNR |
| | | FSGVPDRFSGSGSRTDFTLKISRVEAEDVGVYYCMQYIEAPLTFGGGTKVEIKRTVAAP |
| | | SVFIFPPSDEQLKSGTASVVCLLNNFYPREAKVQWKVDNALQSGNSQESVTEQDSKDST |
| | | YSLSSTLTLSKADYEKHKVYACEVTHQGLSSPVTKSFNRGEC |
| 598 | VHCDR1 Ab57 | SYAMH |
| 599 | VHCDR2 Ab57 | VISYDGSNKYYADSVKG |
| 600 | VLCDR3 Ab57 | GAGLGFPYGPDGFDI |
| 601 | VLCDR1 Ab57 | TSSRSLLHSDGKTYVY |
| 602 | VLCDR2 Ab57 | ELSNRFS |
| 603 | VLCDR3 Ab57 | MQYIEAPLT |
| 604 | VH Ab57 | EVQLLESGGGVVQPGRSLRLSCAASGFTFSSYAMHWVRQAPGKGLEWVAVISYDGSNKY |
| | | YADSVKGRFTISRDNSKNTLSLQMNSLRVEDTAIYYCVRGAGLGFPYGPDGFDIWGQGT |
| | | MVTVSS |
| 605 | VL Ab57 | DIVMTQTPLSLSVTPGQPASISCTSSRSLLHSDGKTYVYWYVQKSGQPPQLLIYELSNR |
| | | FSGVPDRFSGSGSRTDFTLKISRVEAEDVGVYYCMQYIEAPLTFGGGTKVEIK |
| 606 | HC Ab57 | EVQLLESGGGVVQPGRSLRLSCAASGFTFSSYAMHWVRQAPGKGLEWVAVISYDGSNKY |
| | | YADSVKGRFTISRDNSKNTLSLQMNSLRVEDTAIYYCVRGAGLGFPYGPDGFDIWGQGT |
| | | MVTVSSKGPSVFPLAPSSRSTSESTAALGCLVKDYFPEPVTVSWNSGALTSGVHTFPAV |
| | | LQSSGLYSLSSVVTVPSSNFGTQTYTCNVDHKPSNTKVDKTVERKCCVECPPCPAPPVA |
| | | GPSVFLFPPKPKDTLMISRTPEVTCVVVDVSHEDPEVQFNWYVDGVEVHNAKTKPREEQ |
| | | FNSTFRVVSVLTVVHQDWLNGKEYKCKVSNKGLPAPIEKTISKTKGQPREPQVYTLPPS |
| | | REEMTKNQVSLTCLVKGFYPSDIAVEWESNGQPENNYKTTPPMLDSDGSFFLYSKLTVD |
| | | KSRWQQGNVFSCSVMHEALHNHYTQKSLSLSPG |
| 607 | LC Ab57 | DIVMTQTPLSLSVTPGQPASISCTSSRSLLHSDGKTYVYWYVQKSGQPPQLLIYELSNR |
| | | FSGVPDRFSGSGSRTDFTLKISRVEAEDVGVYYCMQYIEAPLTFGGGTKVEIKRTVAAP |
| | | SVFIFPPSDEQLKSGTASVVCLLNNFYPREAKVQWKVDNALQSGNSQESVTEQDSKDST |
| | | YSLSSTLTLSKADYEKHKVYACEVTHQGLSSPVTKSFNRGEC |
| 608 | VHCDR1 Ab58 | SYAMH |
| 609 | VHCDR2 Ab58 | VISYDGSNKYYADSVKG |
| 610 | VLCDR3 Ab58 | GAGLGWAYGPDGFDI |
| 611 | VLCDR1 Ab58 | TSSRSLLHSDGKTYVY |
| 612 | VLCDR2 Ab58 | ELSNRFS |
| 613 | VLCDR3 Ab58 | MQYIEAPLT |
| 614 | VH Ab58 | EVQLLESGGGVVQPGRSLRLSCAASGFTFSSYAMHWVRQAPGKGLEWVAVISYDGSNKY |
| | | YADSVKGRFTISRDNSKNTLSLQMNSLRVEDTAIYYCVRGAGLGWAYGPDGFDIWGQGT |
| | | MVTVSS |
| 615 | VL Ab58 | DIVMTQTPLSLSVTPGQPASISCTSSRSLLHSDGKTYVYWYVQKSGQPPQLLIYELSNR |
| | | FSGVPDRFSGSGSRTDFTLKISRVEAEDVGVYYCMQYIEAPLTFGGGTKVEIK |
| 616 | HC Ab58 | EVQLLESGGGVVQPGRSLRLSCAASGFTFSSYAMHWVRQAPGKGLEWVAVISYDGSNKY |
| | | YADSVKGRFTISRDNSKNTLSLQMNSLRVEDTAIYYCVRGAGLGWAYGPDGFDIWGQGT |
| | | MVTVSSKGPSVFPLAPSSRSTSESTAALGCLVKDYFPEPVTVSWNSGALTSGVHTFPAV |
| | | LQSSGLYSLSSVVTVPSSNFGTQTYTCNVDHKPSNTKVDKTVERKCCVECPPCPAPPVA |
| | | GPSVFLFPPKPKDTLMISRTPEVTCVVVDVSHEDPEVQFNWYVDGVEVHNAKTKPREEQ |
| | | FNSTFRVVSVLTVVHQDWLNGKEYKCKVSNKGLPAPIEKTISKTKGQPREPQVYTLPPS |
| | | REEMTKNQVSLTCLVKGFYPSDIAVEWESNGQPENNYKTTPPMLDSDGSFFLYSKLTVD |
| | | KSRWQQGNVFSCSVMHEALHNHYTQKSLSLSPG |
| 617 | LC Ab58 | DIVMTQTPLSLSVTPGQPASISCTSSRSLLHSDGKTYVYWYVQKSGQPPQLLIYELSNR |
| | | FSGVPDRFSGSGSRTDFTLKISRVEAEDVGVYYCMQYIEAPLTFGGGTKVEIKRTVAAP |
| | | SVFIFPPSDEQLKSGTASVVCLLNNFYPREAKVQWKVDNALQSGNSQESVTEQDSKDST |
| | | YSLSSTLTLSKADYEKHKVYACEVTHQGLSSPVTKSFNRGEC |
| 618 | VHCDR1 Ab59 | SYAMH |
| 619 | VHCDR2 Ab59 | VISYDGSNKYYADSVKG |
| 620 | VLCDR3 Ab59 | GAGRGYPYGPDGFDI |
| 621 | VLCDR1 Ab59 | TSSRSLLHSDGKTYVY |
| 622 | VLCDR2 Ab59 | ELSNRFS |
| 623 | VLCDR3 Ab59 | MQYIEAPLT |
| 624 | VH Ab59 | EVQLLESGGGVVQPGRSLRLSCAASGFTFSSYAMHWVRQAPGKGLEWVAVISYDGSNKY |
| | | YADSVKGRFTISRDNSKNTLSLQMNSLRVEDTAIYYCVRGAGRGYPYGPDGFDIWGQGT |
| | | MVTVSS |
| 625 | VL Ab59 | DIVMTQTPLSLSVTPGQPASISCTSSRSLLHSDGKTYVYWYVQKSGQPPQLLIYELSNR |
| | | FSGVPDRFSGSGSRTDFTLKISRVEAEDVGVYYCMQYIEAPLTFGGGTKVEIK |
| 626 | HC Ab59 | EVQLLESGGGVVQPGRSLRLSCAASGFTFSSYAMHWVRQAPGKGLEWVAVISYDGSNKY |
| | | YADSVKGRFTISRDNSKNTLSLQMNSLRVEDTAIYYCVRGAGRGYPYGPDGFDIWGQGT |
| | | MVTVSSKGPSVFPLAPSSRSTSESTAALGCLVKDYFPEPVTVSWNSGALTSGVHTFPAV |
| | | LQSSGLYSLSSVVTVPSSNFGTQTYTCNVDHKPSNTKVDKTVERKCCVECPPCPAPPVA |
| | | GPSVFLFPPKPKDTLMISRTPEVTCVVVDVSHEDPEVQFNWYVDGVEVHNAKTKPREEQ |
| | | FNSTFRVVSVLTVVHQDWLNGKEYKCKVSNKGLPAPIEKTISKTKGQPREPQVYTLPPS |
| | | REEMTKNQVSLTCLVKGFYPSDIAVEWESNGQPENNYKTTPPMLDSDGSFFLYSKLTVD |
| | | KSRWQQGNVFSCSVMHEALHNHYTQKSLSLSPG |
| 627 | LC Ab59 | DIVMTQTPLSLSVTPGQPASISCTSSRSLLHSDGKTYVYWYVQKSGQPPQLLIYELSNR |
| | | FSGVPDRFSGSGSRTDFTLKISRVEAEDVGVYYCMQYIEAPLTFGGGTKVEIKRTVAAP |
| | | SVFIFPPSDEQLKSGTASVVCLLNNFYPREAKVQWKVDNALQSGNSQESVTEQDSKDST |
| | | YSLSSTLTLSKADYEKHKVYACEVTHQGLSSPVTKSFNRGEC |
| 628 | VHCDR1 Ab60 | GYAMH |
| 629 | VHCDR2 Ab60 | VISYDGSNKYYADSVKG |
| 630 | VLCDR3 Ab60 | GAGRGLTYGPDGFDI |
| 631 | VLCDR1 Ab60 | TSSRSLLHSDGKTYVY |
| 632 | VLCDR2 Ab60 | ELSNRFS |
| 633 | VLCDR3 Ab60 | MQYIEAPLT |
| 634 | VH Ab60 | EVQLLESGGGVVQPGRSLRLSCAASGFDFAGYAMHWVRQAPGKGLEWVAVISYDGSNKY |
| | | YADSVKGRFTISRDNSKNTLSLQMNSLRVEDTAIYYCVRGAGRGLTYGPDGFDIWGQGT |
| | | MVTVSS |
| 635 | VL Ab60 | DIVMTQTPLSLSVTPGQPASISCTSSRSLLHSDGKTYVYWYVQKSGQPPQLLIYELSNR |
| | | FSGVPDRFSGSGSRTDFTLKISRVEAEDVGVYYCMQYIEAPLTFGGGTKVEIK |
| 636 | HC Ab60 | EVQLLESGGGVVQPGRSLRLSCAASGFDFAGYAMHWVRQAPGKGLEWVAVISYDGSNKY |
| | | YADSVKGRFTISRDNSKNTLSLQMNSLRVEDTAIYYCVRGAGRGLTYGPDGFDIWGQGT |
| | | MVTVSSKGPSVFPLAPSSRSTSESTAALGCLVKDYFPEPVTVSWNSGALTSGVHTFPAV |
| | | LQSSGLYSLSSVVTVPSSNFGTQTYTCNVDHKPSNTKVDKTVERKCCVECPPCPAPPVA |
| | | GPSVFLFPPKPKDTLMISRTPEVTCVVVDVSHEDPEVQFNWYVDGVEVHNAKTKPREEQ |
| | | FNSTFRVVSVLTVVHQDWLNGKEYKCKVSNKGLPAPIEKTISKTKGQPREPQVYTLPPS |
| | | REEMTKNQVSLTCLVKGFYPSDIAVEWESNGQPENNYKTTPPMLDSDGSFFLYSKLTVD |
| | | KSRWQQGNVFSCSVMHEALHNHYTQKSLSLSPG |
| 637 | LC Ab60 | DIVMTQTPLSLSVTPGQPASISCTSSRSLLHSDGKTYVYWYVQKSGQPPQLLIYELSNR |
| | | FSGVPDRFSGSGSRTDFTLKISRVEAEDVGVYYCMQYIEAPLTFGGGTKVEIKRTVAAP |
| | | SVFIFPPSDEQLKSGTASVVCLLNNFYPREAKVQWKVDNALQSGNSQESVTEQDSKDST |
| | | YSLSSTLTLSKADYEKHKVYACEVTHQGLSSPVTKSFNRGEC |
| 638 | VHCDR1 Ab61 | SYAMH |
| 639 | VHCDR2 Ab61 | VISYDGSNKYYADSVKG |
| 640 | VLCDR3 Ab61 | GAGLGLTYGPDGFDI |
| 641 | VLCDR1 Ab61 | TSSRSLLHSDGKTYVY |
| 642 | VLCDR2 Ab61 | ELSNRFS |
| 643 | VLCDR3 Ab61 | MQYIEAPLT |
| 644 | VH Ab61 | EVQLLESGGGVVQPGRSLRLSCAASGFTFSSYAMHWVRQAPGKGLEWVAVISYDGSNKY |
| | | YADSVKGRFTISRDNSKNTLSLQMNSLRVEDTAIYYCVRGAGLGLTYGPDGFDIWGQGT |
| | | MVTVSS |
| 645 | VL Ab61 | DIVMTQTPLSLSVTPGQPASISCTSSRSLLHSDGKTYVYWYVQKSGQPPQLLIYELSNR |
| | | FSGVPDRFSGSGSRTDFTLKISRVEAEDVGVYYCMQYIEAPLTFGGGTKVEIK |
| 646 | HC Ab61 | EVQLLESGGGVVQPGRSLRLSCAASGFTFSSYAMHWVRQAPGKGLEWVAVISYDGSNKY |
| | | YADSVKGRFTISRDNSKNTLSLQMNSLRVEDTAIYYCVRGAGLGLTYGPDGFDIWGQGT |
| | | MVTVSSKGPSVFPLAPSSRSTSESTAALGCLVKDYFPEPVTVSWNSGALTSGVHTFPAV |
| | | LQSSGLYSLSSVVTVPSSNFGTQTYTCNVDHKPSNTKVDKTVERKCCVECPPCPAPPVA |
| | | GPSVFLFPPKPKDTLMISRTPEVTCVVVDVSHEDPEVQFNWYVDGVEVHNAKTKPREEQ |
| | | FNSTFRVVSVLTVVHQDWLNGKEYKCKVSNKGLPAPIEKTISKTKGQPREPQVYTLPPS |
| | | REEMTKNQVSLTCLVKGFYPSDIAVEWESNGQPENNYKTTPPMLDSDGSFFLYSKLTVD |
| | | KSRWQQGNVFSCSVMHEALHNHYTQKSLSLSPG |
| 647 | LC Ab61 | DIVMTQTPLSLSVTPGQPASISCTSSRSLLHSDGKTYVYWYVQKSGQPPQLLIYELSNR |
| | | FSGVPDRFSGSGSRTDFTLKISRVEAEDVGVYYCMQYIEAPLTFGGGTKVEIKRTVAAP |
| | | SVFIFPPSDEQLKSGTASVVCLLNNFYPREAKVQWKVDNALQSGNSQESVTEQDSKDST |
| | | YSLSSTLTLSKADYEKHKVYACEVTHQGLSSPVTKSFNRGEC |
| 648 | VHCDR1 Ab62 | SYAMH |
| 649 | VHCDR2 Ab62 | VISYDGSNKYYADSVKG |
| 650 | VLCDR3 Ab62 | GAGLGYPYGPDGFDI |
| 651 | VLCDR1 Ab62 | TSSRSLLHSDGKTYVY |
| 652 | VLCDR2 Ab62 | ELSNRFS |
| 653 | VLCDR3 Ab62 | MQYIEAPLT |
| 654 | VH Ab62 | EVQLLESGGGVVQPGRSLRLSCAASGFTFSSYAMHWVRQAPGKGLEWVAVISYDGSNKY |
| | | YADSVKGRFTISRDNSKNTLSLQMNSLRVEDTAIYYCVRGAGLGYPYGPDGFDIWGQGT |
| | | MVTVSS |
| 655 | VL Ab62 | DIVMTQTPLSLSVTPGQPASISCTSSRSLLHSDGKTYVYWYVQKSGQPPQLLIYELSNR |
| | | FSGVPDRFSGSGSRTDFTLKISRVEAEDVGVYYCMQYIEAPLTFGGGTKVEIK |
| 656 | HC Ab62 | EVQLLESGGGVVQPGRSLRLSCAASGFTFSSYAMHWVRQAPGKGLEWVAVISYDGSNKY |
| | | YADSVKGRFTISRDNSKNTLSLQMNSLRVEDTAIYYCVRGAGLGYPYGPDGFDIWGQGT |
| | | MVTVSSKGPSVFPLAPSSRSTSESTAALGCLVKDYFPEPVTVSWNSGALTSGVHTFPAV |
| | | LQSSGLYSLSSVVTVPSSNFGTQTYTCNVDHKPSNTKVDKTVERKCCVECPPCPAPPVA |
| | | GPSVFLFPPKPKDTLMISRTPEVTCVVVDVSHEDPEVQFNWYVDGVEVHNAKTKPREEQ |
| | | FNSTFRVVSVLTVVHQDWLNGKEYKCKVSNKGLPAPIEKTISKTKGQPREPQVYTLPPS |
| | | REEMTKNQVSLTCLVKGFYPSDIAVEWESNGQPENNYKTTPPMLDSDGSFFLYSKLTVD |
| | | KSRWQQGNVFSCSVMHEALHNHYTQKSLSLSPG |
| 657 | LC Ab62 | DIVMTQTPLSLSVTPGQPASISCTSSRSLLHSDGKTYVYWYVQKSGQPPQLLIYELSNR |
| | | FSGVPDRFSGSGSRTDFTLKISRVEAEDVGVYYCMQYIEAPLTFGGGTKVEIKRTVAAP |
| | | SVFIFPPSDEQLKSGTASVVCLLNNFYPREAKVQWKVDNALQSGNSQESVTEQDSKDST |
| | | YSLSSTLTLSKADYEKHKVYACEVTHQGLSSPVTKSFNRGEC |
| 658 | VHCDR1 Ab63 | SYAMH |
| 659 | VHCDR2 Ab63 | VISYDGSNKYYADSVKG |
| 660 | VLCDR3 Ab63 | GAGRGYPHGPDGFDI |
| 661 | VLCDR1 Ab63 | TSSRSLLHSDGKTYVY |
| 662 | VLCDR2 Ab63 | ELSNRFS |
| 663 | VLCDR3 Ab63 | MQYIEAPLT |
| 664 | VH Ab63 | EVQLLESGGGVVQPGRSLRLSCAASGFTFSSYAMHWVRQAPGKGLEWVAVISYDGSNKY |
| | | YADSVKGRFTISRDNSKNTLSLQMNSLRVEDTAIYYCVRGAGRGYPHGPDGFDIWGQGT |
| | | MVTVSS |
| 665 | VL Ab63 | DIVMTQTPLSLSVTPGQPASISCTSSRSLLHSDGKTYVYWYVQKSGQPPQLLIYELSNR |
| | | FSGVPDRFSGSGSRTDFTLKISRVEAEDVGVYYCMQYIEAPLTFGGGTKVEIK |
| 666 | HC Ab63 | EVQLLESGGGVVQPGRSLRLSCAASGFTFSSYAMHWVRQAPGKGLEWVAVISYDGSNKY |
| | | YADSVKGRFTISRDNSKNTLSLQMNSLRVEDTAIYYCVRGAGRGYPHGPDGFDIWGQGT |
| | | MVTVSSKGPSVFPLAPSSRSTSESTAALGCLVKDYFPEPVTVSWNSGALTSGVHTFPAV |
| | | LQSSGLYSLSSVVTVPSSNFGTQTYTCNVDHKPSNTKVDKTVERKCCVECPPCPAPPVA |
| | | GPSVFLFPPKPKDTLMISRTPEVTCVVVDVSHEDPEVQFNWYVDGVEVHNAKTKPREEQ |
| | | FNSTFRVVSVLTVVHQDWLNGKEYKCKVSNKGLPAPIEKTISKTKGQPREPQVYTLPPS |
| | | REEMTKNQVSLTCLVKGFYPSDIAVEWESNGQPENNYKTTPPMLDSDGSFFLYSKLTVD |
| | | KSRWQQGNVFSCSVMHEALHNHYTQKSLSLSPG |
| 667 | LC Ab63 | DIVMTQTPLSLSVTPGQPASISCTSSRSLLHSDGKTYVYWYVQKSGQPPQLLIYELSNR |
| | | FSGVPDRFSGSGSRTDFTLKISRVEAEDVGVYYCMQYIEAPLTFGGGTKVEIKRTVAAP |
| | | SVFIFPPSDEQLKSGTASVVCLLNNFYPREAKVQWKVDNALQSGNSQESVTEQDSKDST |
| | | YSLSSTLTLSKADYEKHKVYACEVTHQGLSSPVTKSFNRGEC |
| 668 | VHCDR1 Ab64 | SYAMH |
| 669 | VHCDR2 Ab64 | VISYDGSNKYYADSVKG |
| 670 | VLCDR3 Ab64 | GAGIGYPHGPDGFDI |
| 671 | VLCDR1 Ab64 | TSSRSLLHSDGKTYVY |
| 672 | VLCDR2 Ab64 | ELSNRFS |
| 673 | VLCDR3 Ab64 | MQYIEAPLT |
| 674 | VH Ab64 | EVQLLESGGGVVQPGRSLRLSCAASGFTFSSYAMHWVRQAPGKGLEWVAVISYDGSNKY |
| | | YADSVKGRFTISRDNSKNTLSLQMNSLRVEDTAIYYCVRGAGIGYPHGPDGFDIWGQGT |
| | | MVTVSS |
| 675 | VL Ab64 | DIVMTQTPLSLSVTPGQPASISCTSSRSLLHSDGKTYVYWYVQKSGQPPQLLIYELSNR |
| | | FSGVPDRFSGSGSRTDFTLKISRVEAEDVGVYYCMQYIEAPLTFGGGTKVEIK |
| 676 | HC Ab64 | EVQLLESGGGVVQPGRSLRLSCAASGFTFSSYAMHWVRQAPGKGLEWVAVISYDGSNKY |
| | | YADSVKGRFTISRDNSKNTLSLQMNSLRVEDTAIYYCVRGAGIGYPHGPDGFDIWGQGT |
| | | MVTVSSKGPSVFPLAPSSRSTSESTAALGCLVKDYFPEPVTVSWNSGALTSGVHTFPAV |
| | | LQSSGLYSLSSVVTVPSSNFGTQTYTCNVDHKPSNTKVDKTVERKCCVECPPCPAPPVA |
| | | GPSVFLFPPKPKDTLMISRTPEVTCVVVDVSHEDPEVQFNWYVDGVEVHNAKTKPREEQ |
| | | FNSTFRVVSVLTVVHQDWLNGKEYKCKVSNKGLPAPIEKTISKTKGQPREPQVYTLPPS |
| | | REEMTKNQVSLTCLVKGFYPSDIAVEWESNGQPENNYKTTPPMLDSDGSFFLYSKLTVD |
| | | KSRWQQGNVFSCSVMHEALHNHYTQKSLSLSPG |
| 677 | LC Ab64 | DIVMTQTPLSLSVTPGQPASISCTSSRSLLHSDGKTYVYWYVQKSGQPPQLLIYELSNR |
| | | FSGVPDRFSGSGSRTDFTLKISRVEAEDVGVYYCMQYIEAPLTFGGGTKVEIKRTVAAP |
| | | SVFIFPPSDEQLKSGTASVVCLLNNFYPREAKVQWKVDNALQSGNSQESVTEQDSKDST |
| | | YSLSSTLTLSKADYEKHKVYACEVTHQGLSSPVTKSFNRGEC |
| 678 | VHCDR1 Ab65 | SYAMH |
| 679 | VHCDR2 Ab65 | VISYDGSNKYYADSVKG |
| 680 | VLCDR3 Ab65 | GAGRGYPYGPDGFDI |
| 681 | VLCDR1 Ab65 | TSSRSLLHSDGKTYVY |
| 682 | VLCDR2 Ab65 | ELSNRFS |
| 683 | VLCDR3 Ab65 | MQYIEAPLT |
| 684 | VH Ab65 | EVQLLESGGGVVQPGRSLRLSCAASGFTFSSYAMHWVRQAPGKGLEWVAVISYDGSNKY |
| | | YADSVKGRFTISRDNSKNTLSLQMNSLRVEDTAIYYCVRGAGRGYPYGPDGFDIWGQGT |
| | | MVTVSS |
| 685 | VL Ab65 | DIVMTQTPLSLSVTPGQPASISCTSSRSLLHSDGKTYVYWYVQKSGQPPQLLIYELSNR |
| | | FSGVPDRFSGSGSRTDFTLKISRVEAEDVGVYYCMQYIEAPLTFGGGTKVEIK |
| 686 | HC Ab65 | EVQLLESGGGVVQPGRSLRLSCAASGFTFSSYAMHWVRQAPGKGLEWVAVISYDGSNKY |
| | | YADSVKGRFTISRDNSKNTLSLQMNSLRVEDTAIYYCVRGAGRGYPYGPDGFDIWGQGT |
| | | MVTVSSKGPSVFPLAPSSRSTSESTAALGCLVKDYFPEPVTVSWNSGALTSGVHTFPAV |
| | | LQSSGLYSLSSVVTVPSSNFGTQTYTCNVDHKPSNTKVDKTVERKCCVECPPCPAPPVA |
| | | GPSVFLFPPKPKDTLMISRTPEVTCVVVDVSHEDPEVQFNWYVDGVEVHNAKTKPREEQ |
| | | FNSTFRVVSVLTVVHQDWLNGKEYKCKVSNKGLPAPIEKTISKTKGQPREPQVYTLPPS |
| | | REEMTKNQVSLTCLVKGFYPSDIAVEWESNGQPENNYKTTPPMLDSDGSFFLYSKLTVD |
| | | KSRWQQGNVFSCSVMHEALHNHYTQKSLSLSPG |
| 687 | LC Ab65 | DIVMTQTPLSLSVTPGQPASISCTSSRSLLHSDGKTYVYWYVQKSGQPPQLLIYELSNR |
| | | FSGVPDRFSGSGSRTDFTLKISRVEAEDVGVYYCMQYIEAPLTFGGGTKVEIKRTVAAP |
| | | SVFIFPPSDEQLKSGTASVVCLLNNFYPREAKVQWKVDNALQSGNSQESVTEQDSKDST |
| | | YSLSSTLTLSKADYEKHKVYACEVTHQGLSSPVTKSFNRGEC |
| 688 | VHCDR1 Ab66 | SYAMH |
| 689 | VHCDR2 Ab66 | VISYDGSNKYYADSVKG |
| 690 | VLCDR3 Ab66 | GAGLGFPFGPDGFDI |
| 691 | VLCDR1 Ab66 | TSSRSLLHSDGKTYVY |
| 692 | VLCDR2 Ab66 | ELSNRFS |
| 693 | VLCDR3 Ab66 | MQYIEAPLT |
| 694 | VH Ab66 | EVQLLESGGGVVQPGRSLRLSCAASGFTFSSYAMHWVRQAPGKGLEWVAVISYDGSNKY |
| | | YADSVKGRFTISRDNSKNTLSLQMNSLRVEDTAIYYCVRGAGLGFPFGPDGFDIWGQGT |
| | | MVTVSS |
| 695 | VL Ab66 | DIVMTQTPLSLSVTPGQPASISCTSSRSLLHSDGKTYVYWYVQKSGQPPQLLIYELSNR |
| | | FSGVPDRFSGSGSRTDFTLKISRVEAEDVGVYYCMQYIEAPLTFGGGTKVEIK |
| 696 | HC Ab66 | EVQLLESGGGVVQPGRSLRLSCAASGFTFSSYAMHWVRQAPGKGLEWVAVISYDGSNKY |
| | | YADSVKGRFTISRDNSKNTLSLQMNSLRVEDTAIYYCVRGAGLGFPFGPDGFDIWGQGT |
| | | MVTVSSKGPSVFPLAPSSRSTSESTAALGCLVKDYFPEPVTVSWNSGALTSGVHTFPAV |
| | | LQSSGLYSLSSVVTVPSSNFGTQTYTCNVDHKPSNTKVDKTVERKCCVECPPCPAPPVA |
| | | GPSVFLFPPKPKDTLMISRTPEVTCVVVDVSHEDPEVQFNWYVDGVEVHNAKTKPREEQ |
| | | FNSTFRVVSVLTVVHQDWLNGKEYKCKVSNKGLPAPIEKTISKTKGQPREPQVYTLPPS |
| | | REEMTKNQVSLTCLVKGFYPSDIAVEWESNGQPENNYKTTPPMLDSDGSFFLYSKLTVD |
| | | KSRWQQGNVFSCSVMHEALHNHYTQKSLSLSPG |
| 697 | LC Ab66 | DIVMTQTPLSLSVTPGQPASISCTSSRSLLHSDGKTYVYWYVQKSGQPPQLLIYELSNR |
| | | FSGVPDRFSGSGSRTDFTLKISRVEAEDVGVYYCMQYIEAPLTFGGGTKVEIKRTVAAP |
| | | SVFIFPPSDEQLKSGTASVVCLLNNFYPREAKVQWKVDNALQSGNSQESVTEQDSKDST |
| | | YSLSSTLTLSKADYEKHKVYACEVTHQGLSSPVTKSFNRGEC |
| 698 | VHCDR1 Ab67 | SYAMH |
| 699 | VHCDR2 Ab67 | VISYDGSNKYYADSVKG |
| 700 | VLCDR3 Ab67 | GAGRGFPYGPDGFDI |
| 701 | VLCDR1 Ab67 | TSSRSLLHSDGKTYVY |
| 702 | VLCDR2 Ab67 | ELSNRFS |
| 703 | VLCDR3 Ab67 | MQYIEAPLT |
| 704 | VH Ab67 | EVQLLESGGGVVQPGRSLRLSCAASGFTFSSYAMHWVRQAPGKGLEWVAVISYDGSNKY |
| | | YADSVKGRFTISRDNSKNTLSLQMNSLRVEDTAIYYCVRGAGRGFPYGPDGFDIWGQGT |
| | | MVTVSS |
| 705 | VL Ab67 | DIVMTQTPLSLSVTPGQPASISCTSSRSLLHSDGKTYVYWYVQKSGQPPQLLIYELSNR |
| | | FSGVPDRFSGSGSRTDFTLKISRVEAEDVGVYYCMQYIEAPLTFGGGTKVEIK |
| 706 | HC Ab67 | EVQLLESGGGVVQPGRSLRLSCAASGFTFSSYAMHWVRQAPGKGLEWVAVISYDGSNKY |
| | | YADSVKGRFTISRDNSKNTLSLQMNSLRVEDTAIYYCVRGAGRGFPYGPDGFDIWGQGT |
| | | MVTVSSKGPSVFPLAPSSRSTSESTAALGCLVKDYFPEPVTVSWNSGALTSGVHTFPAV |
| | | LQSSGLYSLSSVVTVPSSNFGTQTYTCNVDHKPSNTKVDKTVERKCCVECPPCPAPPVA |
| | | GPSVFLFPPKPKDTLMISRTPEVTCVVVDVSHEDPEVQFNWYVDGVEVHNAKTKPREEQ |
| | | FNSTFRVVSVLTVVHQDWLNGKEYKCKVSNKGLPAPIEKTISKTKGQPREPQVYTLPPS |
| | | REEMTKNQVSLTCLVKGFYPSDIAVEWESNGQPENNYKTTPPMLDSDGSFFLYSKLTVD |
| | | KSRWQQGNVFSCSVMHEALHNHYTQKSLSLSPG |
| 707 | LC Ab67 | DIVMTQTPLSLSVTPGQPASISCTSSRSLLHSDGKTYVYWYVQKSGQPPQLLIYELSNR |
| | | FSGVPDRFSGSGSRTDFTLKISRVEAEDVGVYYCMQYIEAPLTFGGGTKVEIKRTVAAP |
| | | SVFIFPPSDEQLKSGTASVVCLLNNFYPREAKVQWKVDNALQSGNSQESVTEQDSKDST |
| | | YSLSSTLTLSKADYEKHKVYACEVTHQGLSSPVTKSFNRGEC |
| 708 | VHCDR1 Ab68 | SYAMH |
| 709 | VHCDR2 Ab68 | VISYDGSNKYYADSVKG |
| 710 | VLCDR3 Ab68 | GAGLGYPNGPDGFDI |
| 711 | VLCDR1 Ab68 | TSSRSLLHSDGKTYVY |
| 712 | VLCDR2 Ab68 | ELSNRFS |
| 713 | VLCDR3 Ab68 | MQYIEAPLT |
| 714 | VH Ab68 | EVQLLESGGGVVQPGRSLRLSCAASGFTFSSYAMHWVRQAPGKGLEWVAVISYDGSNKY |
| | | YADSVKGRFTISRDNSKNTLSLQMNSLRVEDTAIYYCVRGAGLGYPNGPDGFDIWGQGT |
| | | MVTVSS |
| 715 | VL Ab68 | DIVMTQTPLSLSVTPGQPASISCTSSRSLLHSDGKTYVYWYVQKSGQPPQLLIYELSNR |
| | | FSGVPDRFSGSGSRTDFTLKISRVEAEDVGVYYCMQYIEAPLTFGGGTKVEIK |
| 716 | HC Ab68 | EVQLLESGGGVVQPGRSLRLSCAASGFTFSSYAMHWVRQAPGKGLEWVAVISYDGSNKY |
| | | YADSVKGRFTISRDNSKNTLSLQMNSLRVEDTAIYYCVRGAGLGYPNGPDGFDIWGQGT |
| | | MVTVSSKGPSVFPLAPSSRSTSESTAALGCLVKDYFPEPVTVSWNSGALTSGVHTFPAV |
| | | LQSSGLYSLSSVVTVPSSNFGTQTYTCNVDHKPSNTKVDKTVERKCCVECPPCPAPPVA |
| | | GPSVFLFPPKPKDTLMISRTPEVTCVVVDVSHEDPEVQFNWYVDGVEVHNAKTKPREEQ |
| | | FNSTFRVVSVLTVVHQDWLNGKEYKCKVSNKGLPAPIEKTISKTKGQPREPQVYTLPPS |
| | | REEMTKNQVSLTCLVKGFYPSDIAVEWESNGQPENNYKTTPPMLDSDGSFFLYSKLTVD |
| | | KSRWQQGNVFSCSVMHEALHNHYTQKSLSLSPG |
| 717 | LC Ab68 | DIVMTQTPLSLSVTPGQPASISCTSSRSLLHSDGKTYVYWYVQKSGQPPQLLIYELSNR |
| | | FSGVPDRFSGSGSRTDFTLKISRVEAEDVGVYYCMQYIEAPLTFGGGTKVEIKRTVAAP |
| | | SVFIFPPSDEQLKSGTASVVCLLNNFYPREAKVQWKVDNALQSGNSQESVTEQDSKDST |
| | | YSLSSTLTLSKADYEKHKVYACEVTHQGLSSPVTKSFNRGEC |
| 718 | VHCDR1 Ab69 | SYAMH |
| 719 | VHCDR2 Ab69 | VISYDGSNKYYADSVKG |
| 720 | VLCDR3 Ab69 | GAGQGFPYGPDGFDI |
| 721 | VLCDR1 Ab69 | TSSRSLLHSDGKTYVY |
| 722 | VLCDR2 Ab69 | ELSNRFS |
| 723 | VLCDR3 Ab69 | MQYIEAPLT |
| 724 | VH Ab69 | EVQLLESGGGVVQPGRSLRLSCAASGFTFSSYAMHWVRQAPGKGLEWVAVISYDGSNKY |
| | | YADSVKGRFTISRDNSKNTLSLQMNSLRVEDTAIYYCVRGAGQGFPYGPDGFDIWGQGT |
| | | MVTVSS |
| 725 | VL Ab69 | DIVMTQTPLSLSVTPGQPASISCTSSRSLLHSDGKTYVYWYVQKSGQPPQLLIYELSNR |
| | | FSGVPDRFSGSGSRTDFTLKISRVEAEDVGVYYCMQYIEAPLTFGGGTKVEIK |
| 726 | HC Ab69 | EVQLLESGGGVVQPGRSLRLSCAASGFTFSSYAMHWVRQAPGKGLEWVAVISYDGSNKY |
| | | YADSVKGRFTISRDNSKNTLSLQMNSLRVEDTAIYYCVRGAGQGFPYGPDGFDIWGQGT |
| | | MVTVSSKGPSVFPLAPSSRSTSESTAALGCLVKDYFPEPVTVSWNSGALTSGVHTFPAV |
| | | LQSSGLYSLSSVVTVPSSNFGTQTYTCNVDHKPSNTKVDKTVERKCCVECPPCPAPPVA |
| | | GPSVFLFPPKPKDTLMISRTPEVTCVVVDVSHEDPEVQFNWYVDGVEVHNAKTKPREEQ |
| | | FNSTFRVVSVLTVVHQDWLNGKEYKCKVSNKGLPAPIEKTISKTKGQPREPQVYTLPPS |
| | | REEMTKNQVSLTCLVKGFYPSDIAVEWESNGQPENNYKTTPPMLDSDGSFFLYSKLTVD |
| | | KSRWQQGNVFSCSVMHEALHNHYTQKSLSLSPG |
| 727 | LC Ab69 | DIVMTQTPLSLSVTPGQPASISCTSSRSLLHSDGKTYVYWYVQKSGQPPQLLIYELSNR |
| | | FSGVPDRFSGSGSRTDFTLKISRVEAEDVGVYYCMQYIEAPLTFGGGTKVEIKRTVAAP |
| | | SVFIFPPSDEQLKSGTASVVCLLNNFYPREAKVQWKVDNALQSGNSQESVTEQDSKDST |
| | | YSLSSTLTLSKADYEKHKVYACEVTHQGLSSPVTKSFNRGEC |
| 728 | VHCDR1 Ab70 | SYAMH |
| 729 | VHCDR2 Ab70 | VISYDGSNKYYADSVKG |
| 730 | VLCDR3 Ab70 | GAGQGYPYGPDGFDI |
| 731 | VLCDR1 Ab70 | KSSRSLLHSDGKTYVY |
| 732 | VLCDR2 Ab70 | ELSNRFS |
| 733 | VLCDR3 Ab70 | MQYIEAPLT |
| 734 | VH Ab70 | EVQLLESGGGVVQPGRSLRLSCAASGFTFSSYAMHWVRQAPGKGLEWVAVISYDGSNKY |
| | | YADSVKGRFTISRDNSKNTLSLQMNSLRVEDTAIYYCVRGAGQGYPYGPDGFDIWGQGT |
| | | MVTVSS |
| 735 | VL Ab70 | DIVMTQTPLSLSVTPGQPASISCKSSRSLLHSDGKTYVYWYVQKSGQPPQLLIYELSNR |
| | | FSGVPDRFSGSGSRTDFTLKISRVEAEDVGVYYCMQYIEAPLTFGGGTKVEIK |
| 736 | HC Ab70 | EVQLLESGGGVVQPGRSLRLSCAASGFTFSSYAMHWVRQAPGKGLEWVAVISYDGSNKY |
| | | YADSVKGRFTISRDNSKNTLSLQMNSLRVEDTAIYYCVRGAGQGYPYGPDGFDIWGQGT |
| | | MVTVSSKGPSVFPLAPSSRSTSESTAALGCLVKDYFPEPVTVSWNSGALTSGVHTFPAV |
| | | LQSSGLYSLSSVVTVPSSNFGTQTYTCNVDHKPSNTKVDKTVERKCCVECPPCPAPPVA |
| | | GPSVFLFPPKPKDTLMISRTPEVTCVVVDVSHEDPEVQFNWYVDGVEVHNAKTKPREEQ |
| | | FNSTFRVVSVLTVVHQDWLNGKEYKCKVSNKGLPAPIEKTISKTKGQPREPQVYTLPPS |
| | | REEMTKNQVSLTCLVKGFYPSDIAVEWESNGQPENNYKTTPPMLDSDGSFFLYSKLTVD |
| | | KSRWQQGNVFSCSVMHEALHNHYTQKSLSLSPG |
| 737 | LC Ab70 | DIVMTQTPLSLSVTPGQPASISCKSSRSLLHSDGKTYVYWYVQKSGQPPQLLIYELSNR |
| | | FSGVPDRFSGSGSRTDFTLKISRVEAEDVGVYYCMQYIEAPLTFGGGTKVEIKRTVAAP |
| | | SVFIFPPSDEQLKSGTASVVCLLNNFYPREAKVQWKVDNALQSGNSQESVTEQDSKDST |
| | | YSLSSTLTLSKADYEKHKVYACEVTHQGLSSPVTKSFNRGEC |
| 738 | VHCDR1 Ab71 | SYAMH |
| 739 | VHCDR2 Ab71 | VISYDGSNKYYADSVKG |
| 740 | VLCDR3 Ab71 | GAGTGFTYGPDGFDI |
| 741 | VLCDR1 Ab71 | KSSRSLLHSDGKTYVY |
| 742 | VLCDR2 Ab71 | ELSNRFS |
| 743 | VLCDR3 Ab71 | MQYIEAPLT |
| 744 | VH Ab71 | EVQLLESGGGVVQPGRSLRLSCAASGFTFSSYAMHWVRQAPGKGLEWVAVISYDGSNKY |
| | | YADSVKGRFTISRDNSKNTLSLQMNSLRVEDTAIYYCVRGAGTGFTYGPDGFDIWGQGT |
| | | MVTVSS |
| 745 | VL Ab71 | DIVMTQTPLSLSVTPGQPASISCKSSRSLLHSDGKTYVYWYVQKSGQPPQLLIYELSNR |
| | | FSGVPDRFSGSGSRTDFTLKISRVEAEDVGVYYCMQYIEAPLTFGGGTKVEIK |
| 746 | HC Ab71 | EVQLLESGGGVVQPGRSLRLSCAASGFTFSSYAMHWVRQAPGKGLEWVAVISYDGSNKY |
| | | YADSVKGRFTISRDNSKNTLSLQMNSLRVEDTAIYYCVRGAGTGFTYGPDGFDIWGQGT |
| | | MVTVSSKGPSVFPLAPSSRSTSESTAALGCLVKDYFPEPVTVSWNSGALTSGVHTFPAV |
| | | LQSSGLYSLSSVVTVPSSNFGTQTYTCNVDHKPSNTKVDKTVERKCCVECPPCPAPPVA |
| | | GPSVFLFPPKPKDTLMISRTPEVTCVVVDVSHEDPEVQFNWYVDGVEVHNAKTKPREEQ |
| | | FNSTFRVVSVLTVVHQDWLNGKEYKCKVSNKGLPAPIEKTISKTKGQPREPQVYTLPPS |
| | | REEMTKNQVSLTCLVKGFYPSDIAVEWESNGQPENNYKTTPPMLDSDGSFFLYSKLTVD |
| | | KSRWQQGNVFSCSVMHEALHNHYTQKSLSLSPG |
| 747 | LC Ab71 | DIVMTQTPLSLSVTPGQPASISCKSSRSLLHSDGKTYVYWYVQKSGQPPQLLIYELSNR |
| | | FSGVPDRFSGSGSRTDFTLKISRVEAEDVGVYYCMQYIEAPLTFGGGTKVEIKRTVAAP |
| | | SVFIFPPSDEQLKSGTASVVCLLNNFYPREAKVQWKVDNALQSGNSQESVTEQDSKDST |
| | | YSLSSTLTLSKADYEKHKVYACEVTHQGLSSPVTKSFNRGEC |
| 748 | VHCDR1 Ab72 | SYAMH |
| 749 | VHCDR2 Ab72 | VISYDGSNKYYADSVKG |
| 750 | VLCDR3 Ab72 | GAGMGLTYGPDGFDI |
| 751 | VLCDR1 Ab72 | KSSRSLLHSDGKTYVY |
| 752 | VLCDR2 Ab72 | ELSNRFS |
| 753 | VLCDR3 Ab72 | MQYIEAPLT |
| 754 | VH Ab72 | EVQLLESGGGVVQPGRSLRLSCAASGFTFSSYAMHWVRQAPGKGLEWVAVISYDGSNKY |
| | | YADSVKGRFTISRDNSKNTLSLQMNSLRVEDTAIYYCVRGAGMGLTYGPDGFDIWGQGT |
| | | MVTVSS |
| 755 | VL Ab72 | DIVMTQTPLSLSVTPGQPASISCKSSRSLLHSDGKTYVYWYVQKSGQPPQLLIYELSNR |
| | | FSGVPDRFSGSGSRTDFTLKISRVEAEDVGVYYCMQYIEAPLTFGGGTKVEIK |
| 756 | HC Ab72 | EVQLLESGGGVVQPGRSLRLSCAASGFTFSSYAMHWVRQAPGKGLEWVAVISYDGSNKY |
| | | YADSVKGRFTISRDNSKNTLSLQMNSLRVEDTAIYYCVRGAGMGLTYGPDGFDIWGQGT |
| | | MVTVSSKGPSVFPLAPSSRSTSESTAALGCLVKDYFPEPVTVSWNSGALTSGVHTFPAV |
| | | LQSSGLYSLSSVVTVPSSNFGTQTYTCNVDHKPSNTKVDKTVERKCCVECPPCPAPPVA |
| | | GPSVFLFPPKPKDTLMISRTPEVTCVVVDVSHEDPEVQFNWYVDGVEVHNAKTKPREEQ |
| | | FNSTFRVVSVLTVVHQDWLNGKEYKCKVSNKGLPAPIEKTISKTKGQPREPQVYTLPPS |
| | | REEMTKNQVSLTCLVKGFYPSDIAVEWESNGQPENNYKTTPPMLDSDGSFFLYSKLTVD |
| | | KSRWQQGNVFSCSVMHEALHNHYTQKSLSLSPG |
| 757 | LC Ab72 | DIVMTQTPLSLSVTPGQPASISCKSSRSLLHSDGKTYVYWYVQKSGQPPQLLIYELSNR |
| | | FSGVPDRFSGSGSRTDFTLKISRVEAEDVGVYYCMQYIEAPLTFGGGTKVEIKRTVAAP |
| | | SVFIFPPSDEQLKSGTASVVCLLNNFYPREAKVQWKVDNALQSGNSQESVTEQDSKDST |
| | | YSLSSTLTLSKADYEKHKVYACEVTHQGLSSPVTKSFNRGEC |
| 758 | VHCDR1 Ab73 | SYAMH |
| 759 | VHCDR2 Ab73 | VISYDGSNKYYADSVKG |
| 760 | VLCDR3 Ab73 | GAGLGFPYGPDGFDI |
| 761 | VLCDR1 Ab73 | KSSRSLLHSDGKTYVY |
| 762 | VLCDR2 Ab73 | ELSNRFS |
| 763 | VLCDR3 Ab73 | MQYIEAPLT |
| 764 | VH Ab73 | EVQLLESGGGVVQPGRSLRLSCAASGFTFSSYAMHWVRQAPGKGLEWVAVISYDGSNKY |
| | | YADSVKGRFTISRDNSKNTLSLQMNSLRVEDTAIYYCVRGAGLGFPYGPDGFDIWGQGT |
| | | MVTVSS |
| 765 | VL Ab73 | DIVMTQTPLSLSVTPGQPASISCKSSRSLLHSDGKTYVYWYVQKSGQPPQLLIYELSNR |
| | | FSGVPDRFSGSGSRTDFTLKISRVEAEDVGVYYCMQYIEAPLTFGGGTKVEIK |
| 766 | HC Ab73 | EVQLLESGGGVVQPGRSLRLSCAASGFTFSSYAMHWVRQAPGKGLEWVAVISYDGSNKY |
| | | YADSVKGRFTISRDNSKNTLSLQMNSLRVEDTAIYYCVRGAGLGFPYGPDGFDIWGQGT |
| | | MVTVSSKGPSVFPLAPSSRSTSESTAALGCLVKDYFPEPVTVSWNSGALTSGVHTFPAV |
| | | LQSSGLYSLSSVVTVPSSNFGTQTYTCNVDHKPSNTKVDKTVERKCCVECPPCPAPPVA |
| | | GPSVFLFPPKPKDTLMISRTPEVTCVVVDVSHEDPEVQFNWYVDGVEVHNAKTKPREEQ |
| | | FNSTFRVVSVLTVVHQDWLNGKEYKCKVSNKGLPAPIEKTISKTKGQPREPQVYTLPPS |
| | | REEMTKNQVSLTCLVKGFYPSDIAVEWESNGQPENNYKTTPPMLDSDGSFFLYSKLTVD |
| | | KSRWQQGNVFSCSVMHEALHNHYTQKSLSLSPG |
| 767 | LC Ab73 | DIVMTQTPLSLSVTPGQPASISCKSSRSLLHSDGKTYVYWYVQKSGQPPQLLIYELSNR |
| | | FSGVPDRFSGSGSRTDFTLKISRVEAEDVGVYYCMQYIEAPLTFGGGTKVEIKRTVAAP |
| | | SVFIFPPSDEQLKSGTASVVCLLNNFYPREAKVQWKVDNALQSGNSQESVTEQDSKDST |
| | | YSLSSTLTLSKADYEKHKVYACEVTHQGLSSPVTKSFNRGEC |
| 768 | VHCDR1 Ab74 | SYAMH |
| 769 | VHCDR2 Ab74 | VISYDGSNKYYADSVKG |
| 770 | VLCDR3 Ab74 | GAGLGWAYGPDGFDI |
| 771 | VLCDR1 Ab74 | KSSRSLLHSDGKTYVY |
| 772 | VLCDR2 Ab74 | ELSNRFS |
| 773 | VLCDR3 Ab74 | MQYIEAPLT |
| 774 | VH Ab74 | EVQLLESGGGVVQPGRSLRLSCAASGFTFSSYAMHWVRQAPGKGLEWVAVISYDGSNKY |
| | | YADSVKGRFTISRDNSKNTLSLQMNSLRVEDTAIYYCVRGAGLGWAYGPDGFDIWGQGT |
| | | MVTVSS |
| 775 | VL Ab74 | DIVMTQTPLSLSVTPGQPASISCKSSRSLLHSDGKTYVYWYVQKSGQPPQLLIYELSNR |
| | | FSGVPDRFSGSGSRTDFTLKISRVEAEDVGVYYCMQYIEAPLTFGGGTKVEIK |
| 776 | HC Ab74 | EVQLLESGGGVVQPGRSLRLSCAASGFTFSSYAMHWVRQAPGKGLEWVAVISYDGSNKY |
| | | YADSVKGRFTISRDNSKNTLSLQMNSLRVEDTAIYYCVRGAGLGWAYGPDGFDIWGQGT |
| | | MVTVSSKGPSVFPLAPSSRSTSESTAALGCLVKDYFPEPVTVSWNSGALTSGVHTFPAV |
| | | LQSSGLYSLSSVVTVPSSNFGTQTYTCNVDHKPSNTKVDKTVERKCCVECPPCPAPPVA |
| | | GPSVFLFPPKPKDTLMISRTPEVTCVVVDVSHEDPEVQFNWYVDGVEVHNAKTKPREEQ |
| | | FNSTFRVVSVLTVVHQDWLNGKEYKCKVSNKGLPAPIEKTISKTKGQPREPQVYTLPPS |
| | | REEMTKNQVSLTCLVKGFYPSDIAVEWESNGQPENNYKTTPPMLDSDGSFFLYSKLTVD |
| | | KSRWQQGNVFSCSVMHEALHNHYTQKSLSLSPG |
| 777 | LC Ab74 | DIVMTQTPLSLSVTPGQPASISCKSSRSLLHSDGKTYVYWYVQKSGQPPQLLIYELSNR |
| | | FSGVPDRFSGSGSRTDFTLKISRVEAEDVGVYYCMQYIEAPLTFGGGTKVEIKRTVAAP |
| | | SVFIFPPSDEQLKSGTASVVCLLNNFYPREAKVQWKVDNALQSGNSQESVTEQDSKDST |
| | | YSLSSTLTLSKADYEKHKVYACEVTHQGLSSPVTKSFNRGEC |
| 778 | VHCDR1 Ab75 | SYAMH |
| 779 | VHCDR2 Ab75 | VISYDGSNKYYADSVKG |
| 780 | VLCDR3 Ab75 | GAGRGYPYGPDGFDI |
| 781 | VLCDR1 Ab75 | KSSRSLLHSDGKTYVY |
| 782 | VLCDR2 Ab75 | ELSNRFS |
| 783 | VLCDR3 Ab75 | MQYIEAPLT |
| 784 | VH Ab75 | EVQLLESGGGVVQPGRSLRLSCAASGFTFSSYAMHWVRQAPGKGLEWVAVISYDGSNKY |
| | | YADSVKGRFTISRDNSKNTLSLQMNSLRVEDTAIYYCVRGAGRGYPYGPDGFDIWGQGT |
| | | MVTVSS |
| 785 | VL Ab75 | DIVMTQTPLSLSVTPGQPASISCKSSRSLLHSDGKTYVYWYVQKSGQPPQLLIYELSNR |
| | | FSGVPDRFSGSGSRTDFTLKISRVEAEDVGVYYCMQYIEAPLTFGGGTKVEIK |
| 786 | HC Ab75 | EVQLLESGGGVVQPGRSLRLSCAASGFTFSSYAMHWVRQAPGKGLEWVAVISYDGSNKY |
| | | YADSVKGRFTISRDNSKNTLSLQMNSLRVEDTAIYYCVRGAGRGYPYGPDGFDIWGQGT |
| | | MVTVSSKGPSVFPLAPSSRSTSESTAALGCLVKDYFPEPVTVSWNSGALTSGVHTFPAV |
| | | LQSSGLYSLSSVVTVPSSNFGTQTYTCNVDHKPSNTKVDKTVERKCCVECPPCPAPPVA |
| | | GPSVFLFPPKPKDTLMISRTPEVTCVVVDVSHEDPEVQFNWYVDGVEVHNAKTKPREEQ |
| | | FNSTFRVVSVLTVVHQDWLNGKEYKCKVSNKGLPAPIEKTISKTKGQPREPQVYTLPPS |
| | | REEMTKNQVSLTCLVKGFYPSDIAVEWESNGQPENNYKTTPPMLDSDGSFFLYSKLTVD |
| | | KSRWQQGNVFSCSVMHEALHNHYTQKSLSLSPG |
| 787 | LC Ab75 | DIVMTQTPLSLSVTPGQPASISCKSSRSLLHSDGKTYVYWYVQKSGQPPQLLIYELSNR |
| | | FSGVPDRFSGSGSRTDFTLKISRVEAEDVGVYYCMQYIEAPLTFGGGTKVEIKRTVAAP |
| | | SVFIFPPSDEQLKSGTASVVCLLNNFYPREAKVQWKVDNALQSGNSQESVTEQDSKDST |
| | | YSLSSTLTLSKADYEKHKVYACEVTHQGLSSPVTKSFNRGEC |
| 788 | VHCDR1 Ab76 | GYAMH |
| 789 | VHCDR2 Ab76 | VISYDGSNKYYADSVKG |
| 790 | VLCDR3 Ab76 | GAGRGLTYGPDGFDI |
| 791 | VLCDR1 Ab76 | KSSRSLLHSDGKTYVY |
| 792 | VLCDR2 Ab76 | ELSNRFS |
| 793 | VLCDR3 Ab76 | MQYIEAPLT |
| 794 | VH Ab76 | EVQLLESGGGVVQPGRSLRLSCAASGFDFAGYAMHWVRQAPGKGLEWVAVISYDGSNKY |
| | | YADSVKGRFTISRDNSKNTLSLQMNSLRVEDTAIYYCVRGAGRGLTYGPDGFDIWGQGT |
| | | MVTVSS |
| 795 | VL Ab76 | DIVMTQTPLSLSVTPGQPASISCKSSRSLLHSDGKTYVYWYVQKSGQPPQLLIYELSNR |
| | | FSGVPDRFSGSGSRTDFTLKISRVEAEDVGVYYCMQYIEAPLTFGGGTKVEIK |
| 796 | HC Ab76 | EVQLLESGGGVVQPGRSLRLSCAASGFDFAGYAMHWVRQAPGKGLEWVAVISYDGSNKY |
| | | YADSVKGRFTISRDNSKNTLSLQMNSLRVEDTAIYYCVRGAGRGLTYGPDGFDIWGQGT |
| | | MVTVSSKGPSVFPLAPSSRSTSESTAALGCLVKDYFPEPVTVSWNSGALTSGVHTFPAV |
| | | LQSSGLYSLSSVVTVPSSNFGTQTYTCNVDHKPSNTKVDKTVERKCCVECPPCPAPPVA |
| | | GPSVFLFPPKPKDTLMISRTPEVTCVVVDVSHEDPEVQFNWYVDGVEVHNAKTKPREEQ |
| | | FNSTFRVVSVLTVVHQDWLNGKEYKCKVSNKGLPAPIEKTISKTKGQPREPQVYTLPPS |
| | | REEMTKNQVSLTCLVKGFYPSDIAVEWESNGQPENNYKTTPPMLDSDGSFFLYSKLTVD |
| | | KSRWQQGNVFSCSVMHEALHNHYTQKSLSLSPG |
| 797 | LC Ab76 | DIVMTQTPLSLSVTPGQPASISCKSSRSLLHSDGKTYVYWYVQKSGQPPQLLIYELSNR |
| | | FSGVPDRFSGSGSRTDFTLKISRVEAEDVGVYYCMQYIEAPLTFGGGTKVEIKRTVAAP |
| | | SVFIFPPSDEQLKSGTASVVCLLNNFYPREAKVQWKVDNALQSGNSQESVTEQDSKDST |
| | | YSLSSTLTLSKADYEKHKVYACEVTHQGLSSPVTKSFNRGEC |
| 798 | VHCDR1 Ab77 | SYAMH |
| 799 | VHCDR2 Ab77 | VISYDGSNKYYADSVKG |
| 800 | VLCDR3 Ab77 | GAGLGLTYGPDGFDI |
| 801 | VLCDR1 Ab77 | KSSRSLLHSDGKTYVY |
| 802 | VLCDR2 Ab77 | ELSNRFS |
| 803 | VLCDR3 Ab77 | MQYIEAPLT |
| 804 | VH Ab77 | EVQLLESGGGVVQPGRSLRLSCAASGFTFSSYAMHWVRQAPGKGLEWVAVISYDGSNKY |
| | | YADSVKGRFTISRDNSKNTLSLQMNSLRVEDTAIYYCVRGAGLGLTYGPDGFDIWGQGT |
| | | MVTVSS |
| 805 | VL Ab77 | DIVMTQTPLSLSVTPGQPASISCKSSRSLLHSDGKTYVYWYVQKSGQPPQLLIYELSNR |
| | | FSGVPDRFSGSGSRTDFTLKISRVEAEDVGVYYCMQYIEAPLTFGGGTKVEIK |
| 806 | HC Ab77 | EVQLLESGGGVVQPGRSLRLSCAASGFTFSSYAMHWVRQAPGKGLEWVAVISYDGSNKY |
| | | YADSVKGRFTISRDNSKNTLSLQMNSLRVEDTAIYYCVRGAGLGLTYGPDGFDIWGQGT |
| | | MVTVSSKGPSVFPLAPSSRSTSESTAALGCLVKDYFPEPVTVSWNSGALTSGVHTFPAV |
| | | LQSSGLYSLSSVVTVPSSNFGTQTYTCNVDHKPSNTKVDKTVERKCCVECPPCPAPPVA |
| | | GPSVFLFPPKPKDTLMISRTPEVTCVVVDVSHEDPEVQFNWYVDGVEVHNAKTKPREEQ |
| | | FNSTFRVVSVLTVVHQDWLNGKEYKCKVSNKGLPAPIEKTISKTKGQPREPQVYTLPPS |
| | | REEMTKNQVSLTCLVKGFYPSDIAVEWESNGQPENNYKTTPPMLDSDGSFFLYSKLTVD |
| | | KSRWQQGNVFSCSVMHEALHNHYTQKSLSLSPG |
| 807 | LC Ab77 | DIVMTQTPLSLSVTPGQPASISCKSSRSLLHSDGKTYVYWYVQKSGQPPQLLIYELSNR |
| | | FSGVPDRFSGSGSRTDFTLKISRVEAEDVGVYYCMQYIEAPLTFGGGTKVEIKRTVAAP |
| | | SVFIFPPSDEQLKSGTASVVCLLNNFYPREAKVQWKVDNALQSGNSQESVTEQDSKDST |
| | | YSLSSTLTLSKADYEKHKVYACEVTHQGLSSPVTKSFNRGEC |
| 808 | VHCDR1 Ab78 | SYAMH |
| 809 | VHCDR2 Ab78 | VISYDGSNKYYADSVKG |
| 810 | VLCDR3 Ab78 | GAGLGYPYGPDGFDI |
| 811 | VLCDR1 Ab78 | KSSRSLLHSDGKTYVY |
| 812 | VLCDR2 Ab78 | ELSNRFS |
| 813 | VLCDR3 Ab78 | MQYIEAPLT |
| 814 | VH Ab78 | EVQLLESGGGVVQPGRSLRLSCAASGFTFSSYAMHWVRQAPGKGLEWVAVISYDGSNKY |
| | | YADSVKGRFTISRDNSKNTLSLQMNSLRVEDTAIYYCVRGAGLGYPYGPDGFDIWGQGT |
| | | MVTVSS |
| 815 | VL Ab78 | DIVMTQTPLSLSVTPGQPASISCKSSRSLLHSDGKTYVYWYVQKSGQPPQLLIYELSNR |
| | | FSGVPDRFSGSGSRTDFTLKISRVEAEDVGVYYCMQYIEAPLTFGGGTKVEIK |
| 816 | HC Ab78 | EVQLLESGGGVVQPGRSLRLSCAASGFTFSSYAMHWVRQAPGKGLEWVAVISYDGSNKY |
| | | YADSVKGRFTISRDNSKNTLSLQMNSLRVEDTAIYYCVRGAGLGYPYGPDGFDIWGQGT |
| | | MVTVSSKGPSVFPLAPSSRSTSESTAALGCLVKDYFPEPVTVSWNSGALTSGVHTFPAV |
| | | LQSSGLYSLSSVVTVPSSNFGTQTYTCNVDHKPSNTKVDKTVERKCCVECPPCPAPPVA |
| | | GPSVFLFPPKPKDTLMISRTPEVTCVVVDVSHEDPEVQFNWYVDGVEVHNAKTKPREEQ |
| | | FNSTFRVVSVLTVVHQDWLNGKEYKCKVSNKGLPAPIEKTISKTKGQPREPQVYTLPPS |
| | | REEMTKNQVSLTCLVKGFYPSDIAVEWESNGQPENNYKTTPPMLDSDGSFFLYSKLTVD |
| | | KSRWQQGNVFSCSVMHEALHNHYTQKSLSLSPG |
| 817 | LC Ab78 | DIVMTQTPLSLSVTPGQPASISCKSSRSLLHSDGKTYVYWYVQKSGQPPQLLIYELSNR |
| | | FSGVPDRFSGSGSRTDFTLKISRVEAEDVGVYYCMQYIEAPLTFGGGTKVEIKRTVAAP |
| | | SVFIFPPSDEQLKSGTASVVCLLNNFYPREAKVQWKVDNALQSGNSQESVTEQDSKDST |
| | | YSLSSTLTLSKADYEKHKVYACEVTHQGLSSPVTKSFNRGEC |
| 818 | VHCDR1 Ab79 | SYAMH |
| 819 | VHCDR2 Ab79 | VISYDGSNKYYADSVKG |
| 820 | VLCDR3 Ab79 | GAGRGYPHGPDGFDI |
| 821 | VLCDR1 Ab79 | KSSRSLLHSDGKTYVY |
| 822 | VLCDR2 Ab79 | ELSNRFS |
| 823 | VLCDR3 Ab79 | MQYIEAPLT |
| 824 | VH Ab79 | EVQLLESGGGVVQPGRSLRLSCAASGFTFSSYAMHWVRQAPGKGLEWVAVISYDGSNKY |
| | | YADSVKGRFTISRDNSKNTLSLQMNSLRVEDTAIYYCVRGAGRGYPHGPDGFDIWGQGT |
| | | MVTVSS |
| 825 | VL Ab79 | DIVMTQTPLSLSVTPGQPASISCKSSRSLLHSDGKTYVYWYVQKSGQPPQLLIYELSNR |
| | | FSGVPDRFSGSGSRTDFTLKISRVEAEDVGVYYCMQYIEAPLTFGGGTKVEIK |
| 826 | HC Ab79 | EVQLLESGGGVVQPGRSLRLSCAASGFTFSSYAMHWVRQAPGKGLEWVAVISYDGSNKY |
| | | YADSVKGRFTISRDNSKNTLSLQMNSLRVEDTAIYYCVRGAGRGYPHGPDGFDIWGQGT |
| | | MVTVSSKGPSVFPLAPSSRSTSESTAALGCLVKDYFPEPVTVSWNSGALTSGVHTFPAV |
| | | LQSSGLYSLSSVVTVPSSNFGTQTYTCNVDHKPSNTKVDKTVERKCCVECPPCPAPPVA |
| | | GPSVFLFPPKPKDTLMISRTPEVTCVVVDVSHEDPEVQFNWYVDGVEVHNAKTKPREEQ |
| | | FNSTFRVVSVLTVVHQDWLNGKEYKCKVSNKGLPAPIEKTISKTKGQPREPQVYTLPPS |
| | | REEMTKNQVSLTCLVKGFYPSDIAVEWESNGQPENNYKTTPPMLDSDGSFFLYSKLTVD |
| | | KSRWQQGNVFSCSVMHEALHNHYTQKSLSLSPG |
| 827 | LC Ab79 | DIVMTQTPLSLSVTPGQPASISCKSSRSLLHSDGKTYVYWYVQKSGQPPQLLIYELSNR |
| | | FSGVPDRFSGSGSRTDFTLKISRVEAEDVGVYYCMQYIEAPLTFGGGTKVEIKRTVAAP |
| | | SVFIFPPSDEQLKSGTASVVCLLNNFYPREAKVQWKVDNALQSGNSQESVTEQDSKDST |
| | | YSLSSTLTLSKADYEKHKVYACEVTHQGLSSPVTKSFNRGEC |
| 828 | VHCDR1 Ab80 | SYAMH |
| 829 | VHCDR2 Ab80 | VISYDGSNKYYADSVKG |
| 830 | VLCDR3 Ab80 | GAGIGYPHGPDGFDI |
| 831 | VLCDR1 Ab80 | KSSRSLLHSDGKTYVY |
| 832 | VLCDR2 Ab80 | ELSNRFS |
| 833 | VLCDR3 Ab80 | MQYIEAPLT |
| 834 | VH Ab80 | EVQLLESGGGVVQPGRSLRLSCAASGFTFSSYAMHWVRQAPGKGLEWVAVISYDGSNKY |
| | | YADSVKGRFTISRDNSKNTLSLQMNSLRVEDTAIYYCVRGAGIGYPHGPDGFDIWGQGT |
| | | MVTVSS |
| 835 | VL Ab80 | DIVMTQTPLSLSVTPGQPASISCKSSRSLLHSDGKTYVYWYVQKSGQPPQLLIYELSNR |
| | | FSGVPDRFSGSGSRTDFTLKISRVEAEDVGVYYCMQYIEAPLTFGGGTKVEIK |
| 836 | HC Ab80 | EVQLLESGGGVVQPGRSLRLSCAASGFTFSSYAMHWVRQAPGKGLEWVAVISYDGSNKY |
| | | YADSVKGRFTISRDNSKNTLSLQMNSLRVEDTAIYYCVRGAGIGYPHGPDGFDIWGQGT |
| | | MVTVSSKGPSVFPLAPSSRSTSESTAALGCLVKDYFPEPVTVSWNSGALTSGVHTFPAV |
| | | LQSSGLYSLSSVVTVPSSNFGTQTYTCNVDHKPSNTKVDKTVERKCCVECPPCPAPPVA |
| | | GPSVFLFPPKPKDTLMISRTPEVTCVVVDVSHEDPEVQFNWYVDGVEVHNAKTKPREEQ |
| | | FNSTFRVVSVLTVVHQDWLNGKEYKCKVSNKGLPAPIEKTISKTKGQPREPQVYTLPPS |
| | | REEMTKNQVSLTCLVKGFYPSDIAVEWESNGQPENNYKTTPPMLDSDGSFFLYSKLTVD |
| | | KSRWQQGNVFSCSVMHEALHNHYTQKSLSLSPG |
| 837 | LC Ab80 | DIVMTQTPLSLSVTPGQPASISCKSSRSLLHSDGKTYVYWYVQKSGQPPQLLIYELSNR |
| | | FSGVPDRFSGSGSRTDFTLKISRVEAEDVGVYYCMQYIEAPLTFGGGTKVEIKRTVAAP |
| | | SVFIFPPSDEQLKSGTASVVCLLNNFYPREAKVQWKVDNALQSGNSQESVTEQDSKDST |
| | | YSLSSTLTLSKADYEKHKVYACEVTHQGLSSPVTKSFNRGEC |
| 838 | VHCDR1 Ab81 | SYAMH |
| 839 | VHCDR2 Ab81 | VISYDGSNKYYADSVKG |
| 840 | VLCDR3 Ab81 | GAGRGYPYGPDGFDI |
| 841 | VLCDR1 Ab81 | KSSRSLLHSDGKTYVY |
| 842 | VLCDR2 Ab81 | ELSNRFS |
| 843 | VLCDR3 Ab81 | MQYIEAPLT |
| 844 | VH Ab81 | EVQLLESGGGVVQPGRSLRLSCAASGFTFSSYAMHWVRQAPGKGLEWVAVISYDGSNKY |
| | | YADSVKGRFTISRDNSKNTLSLQMNSLRVEDTAIYYCVRGAGRGYPYGPDGFDIWGQGT |
| | | MVTVSS |
| 845 | VL Ab81 | DIVMTQTPLSLSVTPGQPASISCKSSRSLLHSDGKTYVYWYVQKSGQPPQLLIYELSNR |
| | | FSGVPDRFSGSGSRTDFTLKISRVEAEDVGVYYCMQYIEAPLTFGGGTKVEIK |
| 846 | HC Ab81 | EVQLLESGGGVVQPGRSLRLSCAASGFTFSSYAMHWVRQAPGKGLEWVAVISYDGSNKY |
| | | YADSVKGRFTISRDNSKNTLSLQMNSLRVEDTAIYYCVRGAGRGYPYGPDGFDIWGQGT |
| | | MVTVSSKGPSVFPLAPSSRSTSESTAALGCLVKDYFPEPVTVSWNSGALTSGVHTFPAV |
| | | LQSSGLYSLSSVVTVPSSNFGTQTYTCNVDHKPSNTKVDKTVERKCCVECPPCPAPPVA |
| | | GPSVFLFPPKPKDTLMISRTPEVTCVVVDVSHEDPEVQFNWYVDGVEVHNAKTKPREEQ |
| | | FNSTFRVVSVLTVVHQDWLNGKEYKCKVSNKGLPAPIEKTISKTKGQPREPQVYTLPPS |
| | | REEMTKNQVSLTCLVKGFYPSDIAVEWESNGQPENNYKTTPPMLDSDGSFFLYSKLTVD |
| | | KSRWQQGNVFSCSVMHEALHNHYTQKSLSLSPG |
| 847 | LC Ab81 | DIVMTQTPLSLSVTPGQPASISCKSSRSLLHSDGKTYVYWYVQKSGQPPQLLIYELSNR |
| | | FSGVPDRFSGSGSRTDFTLKISRVEAEDVGVYYCMQYIEAPLTFGGGTKVEIKRTVAAP |
| | | SVFIFPPSDEQLKSGTASVVCLLNNFYPREAKVQWKVDNALQSGNSQESVTEQDSKDST |
| | | YSLSSTLTLSKADYEKHKVYACEVTHQGLSSPVTKSFNRGEC |
| 848 | VHCDR1 Ab82 | SYAMH |
| 849 | VHCDR2 Ab82 | VISYDGSNKYYADSVKG |
| 850 | VLCDR3 Ab82 | GAGLGFPFGPDGFDI |
| 851 | VLCDR1 Ab82 | KSSRSLLHSDGKTYVY |
| 852 | VLCDR2 Ab82 | ELSNRFS |
| 853 | VLCDR3 Ab82 | MQYIEAPLT |
| 854 | VH Ab82 | EVQLLESGGGVVQPGRSLRLSCAASGFTFSSYAMHWVRQAPGKGLEWVAVISYDGSNKY |
| | | YADSVKGRFTISRDNSKNTLSLQMNSLRVEDTAIYYCVRGAGLGFPFGPDGFDIWGQGT |
| | | MVTVSS |
| 855 | VL Ab82 | DIVMTQTPLSLSVTPGQPASISCKSSRSLLHSDGKTYVYWYVQKSGQPPQLLIYELSNR |
| | | FSGVPDRFSGSGSRTDFTLKISRVEAEDVGVYYCMQYIEAPLTFGGGTKVEIK |
| 856 | HC Ab82 | EVQLLESGGGVVQPGRSLRLSCAASGFTFSSYAMHWVRQAPGKGLEWVAVISYDGSNKY |
| | | YADSVKGRFTISRDNSKNTLSLQMNSLRVEDTAIYYCVRGAGLGFPFGPDGFDIWGQGT |
| | | MVTVSSKGPSVFPLAPSSRSTSESTAALGCLVKDYFPEPVTVSWNSGALTSGVHTFPAV |
| | | LQSSGLYSLSSVVTVPSSNFGTQTYTCNVDHKPSNTKVDKTVERKCCVECPPCPAPPVA |
| | | GPSVFLFPPKPKDTLMISRTPEVTCVVVDVSHEDPEVQFNWYVDGVEVHNAKTKPREEQ |
| | | FNSTFRVVSVLTVVHQDWLNGKEYKCKVSNKGLPAPIEKTISKTKGQPREPQVYTLPPS |
| | | REEMTKNQVSLTCLVKGFYPSDIAVEWESNGQPENNYKTTPPMLDSDGSFFLYSKLTVD |
| | | KSRWQQGNVFSCSVMHEALHNHYTQKSLSLSPG |
| 857 | LC Ab82 | DIVMTQTPLSLSVTPGQPASISCKSSRSLLHSDGKTYVYWYVQKSGQPPQLLIYELSNR |
| | | FSGVPDRFSGSGSRTDFTLKISRVEAEDVGVYYCMQYIEAPLTFGGGTKVEIKRTVAAP |
| | | SVFIFPPSDEQLKSGTASVVCLLNNFYPREAKVQWKVDNALQSGNSQESVTEQDSKDST |
| | | YSLSSTLTLSKADYEKHKVYACEVTHQGLSSPVTKSFNRGEC |
| 858 | VHCDR1 Ab83 | SYAMH |
| 859 | VHCDR2 Ab83 | VISYDGSNKYYADSVKG |
| 860 | VLCDR3 Ab83 | GAGRGFPYGPDGFDI |
| 861 | VLCDR1 Ab83 | KSSRSLLHSDGKTYVY |
| 862 | VLCDR2 Ab83 | ELSNRFS |
| 863 | VLCDR3 Ab83 | MQYIEAPLT |
| 864 | VH Ab83 | EVQLLESGGGVVQPGRSLRLSCAASGFTFSSYAMHWVRQAPGKGLEWVAVISYDGSNKY |
| | | YADSVKGRFTISRDNSKNTLSLQMNSLRVEDTAIYYCVRGAGRGFPYGPDGFDIWGQGT |
| | | MVTVSS |
| 865 | VL Ab83 | DIVMTQTPLSLSVTPGQPASISCKSSRSLLHSDGKTYVYWYVQKSGQPPQLLIYELSNR |
| | | FSGVPDRFSGSGSRTDFTLKISRVEAEDVGVYYCMQYIEAPLTFGGGTKVEIK |
| 866 | HC Ab83 | EVQLLESGGGVVQPGRSLRLSCAASGFTFSSYAMHWVRQAPGKGLEWVAVISYDGSNKY |
| | | YADSVKGRFTISRDNSKNTLSLQMNSLRVEDTAIYYCVRGAGRGFPYGPDGFDIWGQGT |
| | | MVTVSSKGPSVFPLAPSSRSTSESTAALGCLVKDYFPEPVTVSWNSGALTSGVHTFPAV |
| | | LQSSGLYSLSSVVTVPSSNFGTQTYTCNVDHKPSNTKVDKTVERKCCVECPPCPAPPVA |
| | | GPSVFLFPPKPKDTLMISRTPEVTCVVVDVSHEDPEVQFNWYVDGVEVHNAKTKPREEQ |
| | | FNSTFRVVSVLTVVHQDWLNGKEYKCKVSNKGLPAPIEKTISKTKGQPREPQVYTLPPS |
| | | REEMTKNQVSLTCLVKGFYPSDIAVEWESNGQPENNYKTTPPMLDSDGSFFLYSKLTVD |
| | | KSRWQQGNVFSCSVMHEALHNHYTQKSLSLSPG |
| 867 | LC Ab83 | DIVMTQTPLSLSVTPGQPASISCKSSRSLLHSDGKTYVYWYVQKSGQPPQLLIYELSNR |
| | | FSGVPDRFSGSGSRTDFTLKISRVEAEDVGVYYCMQYIEAPLTFGGGTKVEIKRTVAAP |
| | | SVFIFPPSDEQLKSGTASVVCLLNNFYPREAKVQWKVDNALQSGNSQESVTEQDSKDST |
| | | YSLSSTLTLSKADYEKHKVYACEVTHQGLSSPVTKSFNRGEC |
| 868 | VHCDR1 Ab84 | SYAMH |
| 869 | VHCDR2 Ab84 | VISYDGSNKYYADSVKG |
| 870 | VLCDR3 Ab84 | GAGLGYPNGPDGFDI |
| 871 | VLCDR1 Ab84 | KSSRSLLHSDGKTYVY |
| 872 | VLCDR2 Ab84 | ELSNRFS |
| 873 | VLCDR3 Ab84 | MQYIEAPLT |
| 874 | VH Ab84 | EVQLLESGGGVVQPGRSLRLSCAASGFTFSSYAMHWVRQAPGKGLEWVAVISYDGSNKY |
| | | YADSVKGRFTISRDNSKNTLSLQMNSLRVEDTAIYYCVRGAGLGYPNGPDGFDIWGQGT |
| | | MVTVSS |
| 875 | VL Ab84 | DIVMTQTPLSLSVTPGQPASISCKSSRSLLHSDGKTYVYWYVQKSGQPPQLLIYELSNR |
| | | FSGVPDRFSGSGSRTDFTLKISRVEAEDVGVYYCMQYIEAPLTFGGGTKVEIK |
| 876 | HC Ab84 | EVQLLESGGGVVQPGRSLRLSCAASGFTFSSYAMHWVRQAPGKGLEWVAVISYDGSNKY |
| | | YADSVKGRFTISRDNSKNTLSLQMNSLRVEDTAIYYCVRGAGLGYPNGPDGFDIWGQGT |
| | | MVTVSSKGPSVFPLAPSSRSTSESTAALGCLVKDYFPEPVTVSWNSGALTSGVHTFPAV |
| | | LQSSGLYSLSSVVTVPSSNFGTQTYTCNVDHKPSNTKVDKTVERKCCVECPPCPAPPVA |
| | | GPSVFLFPPKPKDTLMISRTPEVTCVVVDVSHEDPEVQFNWYVDGVEVHNAKTKPREEQ |
| | | FNSTFRVVSVLTVVHQDWLNGKEYKCKVSNKGLPAPIEKTISKTKGQPREPQVYTLPPS |
| | | REEMTKNQVSLTCLVKGFYPSDIAVEWESNGQPENNYKTTPPMLDSDGSFFLYSKLTVD |
| | | KSRWQQGNVFSCSVMHEALHNHYTQKSLSLSPG |
| 877 | LC Ab84 | DIVMTQTPLSLSVTPGQPASISCKSSRSLLHSDGKTYVYWYVQKSGQPPQLLIYELSNR |
| | | FSGVPDRFSGSGSRTDFTLKISRVEAEDVGVYYCMQYIEAPLTFGGGTKVEIKRTVAAP |
| | | SVFIFPPSDEQLKSGTASVVCLLNNFYPREAKVQWKVDNALQSGNSQESVTEQDSKDST |
| | | YSLSSTLTLSKADYEKHKVYACEVTHQGLSSPVTKSFNRGEC |
| 878 | VHCDR1 Ab85 | SYAMH |
| 879 | VHCDR2 Ab85 | VISYDGSNKYYADSVKG |
| 880 | VLCDR3 Ab85 | GAGQGFPYGPDGFDI |
| 881 | VLCDR1 Ab85 | KSSRSLLHSDGKTYVY |
| 882 | VLCDR2 Ab85 | ELSNRFS |
| 883 | VLCDR3 Ab85 | MQYIEAPLT |
| 884 | VH Ab85 | EVQLLESGGGVVQPGRSLRLSCAASGFTFSSYAMHWVRQAPGKGLEWVAVISYDGSNKY |
| | | YADSVKGRFTISRDNSKNTLSLQMNSLRVEDTAIYYCVRGAGQGFPYGPDGFDIWGQGT |
| | | MVTVSS |
| 885 | VL Ab85 | DIVMTQTPLSLSVTPGQPASISCKSSRSLLHSDGKTYVYWYVQKSGQPPQLLIYELSNR |
| | | FSGVPDRFSGSGSRTDFTLKISRVEAEDVGVYYCMQYIEAPLTFGGGTKVEIK |
| 886 | HC Ab85 | EVQLLESGGGVVQPGRSLRLSCAASGFTFSSYAMHWVRQAPGKGLEWVAVISYDGSNKY |
| | | YADSVKGRFTISRDNSKNTLSLQMNSLRVEDTAIYYCVRGAGQGFPYGPDGFDIWGQGT |
| | | MVTVSSKGPSVFPLAPSSRSTSESTAALGCLVKDYFPEPVTVSWNSGALTSGVHTFPAV |
| | | LQSSGLYSLSSVVTVPSSNFGTQTYTCNVDHKPSNTKVDKTVERKCCVECPPCPAPPVA |
| | | GPSVFLFPPKPKDTLMISRTPEVTCVVVDVSHEDPEVQFNWYVDGVEVHNAKTKPREEQ |
| | | FNSTFRVVSVLTVVHQDWLNGKEYKCKVSNKGLPAPIEKTISKTKGQPREPQVYTLPPS |
| | | REEMTKNQVSLTCLVKGFYPSDIAVEWESNGQPENNYKTTPPMLDSDGSFFLYSKLTVD |
| | | KSRWQQGNVFSCSVMHEALHNHYTQKSLSLSPG |
| 887 | LC Ab85 | DIVMTQTPLSLSVTPGQPASISCKSSRSLLHSDGKTYVYWYVQKSGQPPQLLIYELSNR |
| | | FSGVPDRFSGSGSRTDFTLKISRVEAEDVGVYYCMQYIEAPLTFGGGTKVEIKRTVAAP |
| | | SVFIFPPSDEQLKSGTASVVCLLNNFYPREAKVQWKVDNALQSGNSQESVTEQDSKDST |
| | | YSLSSTLTLSKADYEKHKVYACEVTHQGLSSPVTKSFNRGEC |
| 888 | VHCDR1 Ab86 | SYAMH |
| 889 | VHCDR2 Ab86 | VISYDGSNKYYADSVKG |
| 890 | VLCDR3 Ab86 | GAGRGLTYGPDGFDI |
| 891 | VLCDR1 Ab86 | KSSRSLLWSDGKTYVY |
| 892 | VLCDR2 Ab86 | ELSNRFS |
| 893 | VLCDR3 Ab86 | MQYIEAPLT |
| 894 | VH Ab86 | EVQLLESGGGVVQPGRSLRLSCAASGFTFSSYAMHWVRQAPGKGLEWVAVISYDGSNKY |
| | | YADSVKGRFTISRDNSKNTLSLQMNSLRVEDTAIYYCVRGAGRGLTYGPDGFDIWGQGT |
| | | MVTVSS |
| 895 | VL Ab86 | DIVMTQTPLSLSVTPGQPASISCKSSRSLLWSDGKTYVYWYVQKSGQPPQLLIYELSNR |
| | | FSGVPDRFSGSGSRTDFTLKISRVEAEDVGVYYCMQYIEAPLTFGGGTKVEIK |
| 896 | HC Ab86 | EVQLLESGGGVVQPGRSLRLSCAASGFTFSSYAMHWVRQAPGKGLEWVAVISYDGSNKY |
| | | YADSVKGRFTISRDNSKNTLSLQMNSLRVEDTAIYYCVRGAGRGLTYGPDGFDIWGQGT |
| | | MVTVSSKGPSVFPLAPSSRSTSESTAALGCLVKDYFPEPVTVSWNSGALTSGVHTFPAV |
| | | LQSSGLYSLSSVVTVPSSNFGTQTYTCNVDHKPSNTKVDKTVERKCCVECPPCPAPPVA |
| | | GPSVFLFPPKPKDTLMISRTPEVTCVVVDVSHEDPEVQFNWYVDGVEVHNAKTKPREEQ |
| | | FNSTFRVVSVLTVVHQDWLNGKEYKCKVSNKGLPAPIEKTISKTKGQPREPQVYTLPPS |
| | | REEMTKNQVSLTCLVKGFYPSDIAVEWESNGQPENNYKTTPPMLDSDGSFFLYSKLTVD |
| | | KSRWQQGNVFSCSVMHEALHNHYTQKSLSLSPG |
| 897 | LC Ab86 | DIVMTQTPLSLSVTPGQPASISCKSSRSLLWSDGKTYVYWYVQKSGQPPQLLIYELSNR |
| | | FSGVPDRFSGSGSRTDFTLKISRVEAEDVGVYYCMQYIEAPLTFGGGTKVEIKRTVAAP |
| | | SVFIFPPSDEQLKSGTASVVCLLNNFYPREAKVQWKVDNALQSGNSQESVTEQDSKDST |
| | | YSLSSTLTLSKADYEKHKVYACEVTHQGLSSPVTKSFNRGEC |
| 898 | VHCDR1 Ab87 | SYAMH |
| 899 | VHCDR2 Ab87 | VISYDGSNKYYADSVKG |
| 900 | VLCDR3 Ab87 | GAGRGFTWGPDGFDI |
| 901 | VLCDR1 Ab87 | KSSRSLLHSDGKTYVY |
| 902 | VLCDR2 Ab87 | ELSNRFS |
| 903 | VLCDR3 Ab87 | MQYVEAPLT |
| 904 | VH Ab87 | EVQLLESGGGVVQPGRSLRLSCAASGFTFSSYAMHWVRQAPGKGLEWVAVISYDGSNKY |
| | | YADSVKGRFTISRDNSKNTLSLQMNSLRVEDTAIYYCVRGAGRGFTWGPDGFDIWGQGT |
| | | MVTVSS |
| 905 | VL Ab87 | DIVMTQTPLSLSVTPGQPASISCKSSRSLLHSDGKTYVYWYVQKSGQPPQLLIYELSNR |
| | | FSGVPDRFSGSGSRTDFTLKISRVEAEDVGVYYCMQYVEAPLTFGGGTKVEIK |
| 906 | HC Ab87 | EVQLLESGGGVVQPGRSLRLSCAASGFTFSSYAMHWVRQAPGKGLEWVAVISYDGSNKY |
| | | YADSVKGRFTISRDNSKNTLSLQMNSLRVEDTAIYYCVRGAGRGFTWGPDGFDIWGQGT |
| | | MVTVSSKGPSVFPLAPSSRSTSESTAALGCLVKDYFPEPVTVSWNSGALTSGVHTFPAV |
| | | LQSSGLYSLSSVVTVPSSNFGTQTYTCNVDHKPSNTKVDKTVERKCCVECPPCPAPPVA |
| | | GPSVFLFPPKPKDTLMISRTPEVTCVVVDVSHEDPEVQFNWYVDGVEVHNAKTKPREEQ |
| | | FNSTFRVVSVLTVVHQDWLNGKEYKCKVSNKGLPAPIEKTISKTKGQPREPQVYTLPPS |
| | | REEMTKNQVSLTCLVKGFYPSDIAVEWESNGQPENNYKTTPPMLDSDGSFFLYSKLTVD |
| | | KSRWQQGNVFSCSVMHEALHNHYTQKSLSLSPG |
| 907 | LC Ab87 | DIVMTQTPLSLSVTPGQPASISCKSSRSLLHSDGKTYVYWYVQKSGQPPQLLIYELSNR |
| | | FSGVPDRFSGSGSRTDFTLKISRVEAEDVGVYYCMQYVEAPLTFGGGTKVEIKRTVAAP |
| | | SVFIFPPSDEQLKSGTASVVCLLNNFYPREAKVQWKVDNALQSGNSQESVTEQDSKDST |
| | | YSLSSTLTLSKADYEKHKVYACEVTHQGLSSPVTKSFNRGEC |
| 908 | VHCDR1 Ab88 | SYAMH |
| 909 | VHCDR2 Ab88 | VISYDGSNKYYADSVKG |
| 910 | VLCDR3 Ab88 | GAGRGLTYGPDGFDI |
| 911 | VLCDR1 Ab88 | KSSRSLLHSDGKTYLY |
| 912 | VLCDR2 Ab88 | ELSNRFS |
| 913 | VLCDR3 Ab88 | MQYIEAPLT |
| 914 | VH Ab88 | EVQLLESGGGVVQPGRSLRLSCAASGFTFSSYAMHWVRQAPGKGLEWVAVISYDGSNKY |
| | | YADSVKGRFTISRDNSKNTLSLQMNSLRVEDTAIYYCVRGAGRGLTYGPDGFDIWGQGT |
| | | MVTVSS |
| 915 | VL Ab88 | DIVMTQTPLSLSVTPGQPASISCKSSRSLLHSDGKTYLYWYVQKSGQPPQLLIYELSNR |
| | | FSGVPDRFSGSGSRTDFTLKISRVEAEDVGVYYCMQYIEAPLTFGGGTKVEIK |
| 916 | HC Ab88 | EVQLLESGGGVVQPGRSLRLSCAASGFTFSSYAMHWVRQAPGKGLEWVAVISYDGSNKY |
| | | YADSVKGRFTISRDNSKNTLSLQMNSLRVEDTAIYYCVRGAGRGLTYGPDGFDIWGQGT |
| | | MVTVSSKGPSVFPLAPSSRSTSESTAALGCLVKDYFPEPVTVSWNSGALTSGVHTFPAV |
| | | LQSSGLYSLSSVVTVPSSNFGTQTYTCNVDHKPSNTKVDKTVERKCCVECPPCPAPPVA |
| | | GPSVFLFPPKPKDTLMISRTPEVTCVVVDVSHEDPEVQFNWYVDGVEVHNAKTKPREEQ |
| | | FNSTFRVVSVLTVVHQDWLNGKEYKCKVSNKGLPAPIEKTISKTKGQPREPQVYTLPPS |
| | | REEMTKNQVSLTCLVKGFYPSDIAVEWESNGQPENNYKTTPPMLDSDGSFFLYSKLTVD |
| | | KSRWQQGNVFSCSVMHEALHNHYTQKSLSLSPG |
| 917 | LC Ab88 | DIVMTQTPLSLSVTPGQPASISCKSSRSLLHSDGKTYLYWYVQKSGQPPQLLIYELSNR |
| | | FSGVPDRFSGSGSRTDFTLKISRVEAEDVGVYYCMQYIEAPLTFGGGTKVEIKRTVAAP |
| | | SVFIFPPSDEQLKSGTASVVCLLNNFYPREAKVQWKVDNALQSGNSQESVTEQDSKDST |
| | | YSLSSTLTLSKADYEKHKVYACEVTHQGLSSPVTKSFNRGEC |
| 918 | VHCDR1 Ab89 | SYAMH |
| 919 | VHCDR2 Ab89 | VISYDGSNKYYADSVKG |
| 920 | VLCDR3 Ab89 | GAGRGFPYGPDGFDI |
| 921 | VLCDR1 Ab89 | RSSRSLLHSDGKTYVY |
| 922 | VLCDR2 Ab89 | ELSNRFS |
| 923 | VLCDR3 Ab89 | MQYIEAPLT |
| 924 | VH Ab89 | EVQLLESGGGVVQPGRSLRLSCAASGFTFSSYAMHWVRQAPGKGLEWVAVISYDGSNKY |
| | | YADSVKGRFTISRDNSKNTLSLQMNSLRVEDTAIYYCVRGAGRGFPYGPDGFDIWGQGT |
| | | MVTVSS |
| 925 | VL Ab89 | DIVMTQTPLSLSVTPGQPASISCRSSRSLLHSDGKTYVYWYVQKSGQPPQLLIYELSNR |
| | | FSGVPDRFSGSGSRTDFTLKISRVEAEDVGVYYCMQYIEVPLTFGGGTKVEIK |
| 926 | HC Ab89 | EVQLLESGGGVVQPGRSLRLSCAASGFTFSSYAMHWVRQAPGKGLEWVAVISYDGSNKY |
| | | YADSVKGRFTISRDNSKNTLSLQMNSLRVEDTAIYYCVRGAGRGFPYGPDGFDIWGQGT |
| | | MVTVSSKGPSVFPLAPSSRSTSESTAALGCLVKDYFPEPVTVSWNSGALTSGVHTFPAV |
| | | LQSSGLYSLSSVVTVPSSNFGTQTYTCNVDHKPSNTKVDKTVERKCCVECPPCPAPPVA |
| | | GPSVFLFPPKPKDTLMISRTPEVTCVVVDVSHEDPEVQFNWYVDGVEVHNAKTKPREEQ |
| | | FNSTFRVVSVLTVVHQDWLNGKEYKCKVSNKGLPAPIEKTISKTKGQPREPQVYTLPPS |
| | | REEMTKNQVSLTCLVKGFYPSDIAVEWESNGQPENNYKTTPPMLDSDGSFFLYSKLTVD |
| | | KSRWQQGNVFSCSVMHEALHNHYTQKSLSLSPG |
| 927 | LC Ab89 | DIVMTQTPLSLSVTPGQPASISCRSSRSLLHSDGKTYVYWYVQKSGQPPQLLIYELSNR |
| | | FSGVPDRFSGSGSRTDFTLKISRVEAEDVGVYYCMQYIEVPLTFGGGTKVEIKRTVAAP |
| | | SVFIFPPSDEQLKSGTASVVCLLNNFYPREAKVQWKVDNALQSGNSQESVTEQDSKDST |
| | | YSLSSTLTLSKADYEKHKVYACEVTHQGLSSPVTKSFNRGEC |
| 928 | VHCDR1 Ab90 | SYAMH |
| 929 | VHCDR2 Ab90 | VISYDGSNKYYADSVKG |
| 930 | VLCDR3 Ab90 | GAGRGYPYGPDGFDI |
| 931 | VLCDR1 Ab90 | TSSRSLLHSDGKTYVY |
| 932 | VLCDR2 Ab90 | ELSNRFS |
| 933 | VLCDR3 Ab90 | MQYVEAPLT |
| 934 | VH Ab90 | EVQLLESGGGVVQPGRSLRLSCAASGFTFSSYAMHWVRQAPGKGLEWVAVISYDGSNKY |
| | | YADSVKGRFTISRDNSKNTLSLQMNSLRVEDTAIYYCVRGAGRGYPYGPDGFDIWGQGT |
| | | MVTVSS |
| 935 | VL Ab90 | DIVMTQTPLSLSVTPGQPASISCTSSRSLLHSDGKTYVYWYVQKSGQPPQLLIYELSNR |
| | | FSGVPDRFSGSGSRTDFTLKISRVEAEDVGVYYCMQYVEVPLTFGGGTKVEIK |
| 936 | HC Ab90 | EVQLLESGGGVVQPGRSLRLSCAASGFTFSSYAMHWVRQAPGKGLEWVAVISYDGSNKY |
| | | YADSVKGRFTISRDNSKNTLSLQMNSLRVEDTAIYYCVRGAGRGYPYGPDGFDIWGQGT |
| | | MVTVSSKGPSVFPLAPSSRSTSESTAALGCLVKDYFPEPVTVSWNSGALTSGVHTFPAV |
| | | LQSSGLYSLSSVVTVPSSNFGTQTYTCNVDHKPSNTKVDKTVERKCCVECPPCPAPPVA |
| | | GPSVFLFPPKPKDTLMISRTPEVTCVVVDVSHEDPEVQFNWYVDGVEVHNAKTKPREEQ |
| | | FNSTFRVVSVLTVVHQDWLNGKEYKCKVSNKGLPAPIEKTISKTKGQPREPQVYTLPPS |
| | | REEMTKNQVSLTCLVKGFYPSDIAVEWESNGQPENNYKTTPPMLDSDGSFFLYSKLTVD |
| | | KSRWQQGNVFSCSVMHEALHNHYTQKSLSLSPG |
| 937 | LC Ab90 | DIVMTQTPLSLSVTPGQPASISCTSSRSLLHSDGKTYVYWYVQKSGQPPQLLIYELSNR |
| | | FSGVPDRFSGSGSRTDFTLKISRVEAEDVGVYYCMQYVEVPLTFGGGTKVEIKRTVAAP |
| | | SVFIFPPSDEQLKSGTASVVCLLNNFYPREAKVQWKVDNALQSGNSQESVTEQDSKDST |
| | | YSLSSTLTLSKADYEKHKVYACEVTHQGLSSPVTKSFNRGEC |
| 938 | VHCDR1 Ab91 | SYAMH |
| 939 | VHCDR2 Ab91 | VISYDGSNKYYADSVKG |
| 940 | VLCDR3 Ab91 | GAGQGYMHGPDGFDI |
| 941 | VLCDR1 Ab91 | RSSRSLLWSDGKTYVY |
| 942 | VLCDR2 Ab91 | ELSNRFS |
| 943 | VLCDR3 Ab91 | MQYIEAPLT |
| 944 | VH Ab91 | EVQLLESGGGVVQPGRSLRLSCAASGFTFSSYAMHWVRQAPGKGLEWVAVISYDGSNKY |
| | | YADSVKGRFTISRDNSKNTLSLQMNSLRVEDTAIYYCVRGAGQGYMHGPDGFDIWGQGT |
| | | MVTVSS |
| 945 | VL Ab91 | DIVMTQTPLSLSVTPGQPASISCRSSRSLLWSDGKTYVYWYVQKSGQPPQLLIYELSNR |
| | | FSGVPDRFSGSGSRTDFTLKISRVEAEDVGVYYCMQYIEAPLTFGGGTKVEIK |
| 946 | HC Ab91 | EVQLLESGGGVVQPGRSLRLSCAASGFTFSSYAMHWVRQAPGKGLEWVAVISYDGSNKY |
| | | YADSVKGRFTISRDNSKNTLSLQMNSLRVEDTAIYYCVRGAGQGYMHGPDGFDIWGQGT |
| | | MVTVSSKGPSVFPLAPSSRSTSESTAALGCLVKDYFPEPVTVSWNSGALTSGVHTFPAV |
| | | LQSSGLYSLSSVVTVPSSNFGTQTYTCNVDHKPSNTKVDKTVERKCCVECPPCPAPPVA |
| | | GPSVFLFPPKPKDTLMISRTPEVTCVVVDVSHEDPEVQFNWYVDGVEVHNAKTKPREEQ |
| | | FNSTFRVVSVLTVVHQDWLNGKEYKCKVSNKGLPAPIEKTISKTKGQPREPQVYTLPPS |
| | | REEMTKNQVSLTCLVKGFYPSDIAVEWESNGQPENNYKTTPPMLDSDGSFFLYSKLTVD |
| | | KSRWQQGNVFSCSVMHEALHNHYTQKSLSLSPG |
| 947 | LC Ab91 | DIVMTQTPLSLSVTPGQPASISCRSSRSLLWSDGKTYVYWYVQKSGQPPQLLIYELSNR |
| | | FSGVPDRFSGSGSRTDFTLKISRVEAEDVGVYYCMQYIEAPLTFGGGTKVEIKRTVAAP |
| | | SVFIFPPSDEQLKSGTASVVCLLNNFYPREAKVQWKVDNALQSGNSQESVTEQDSKDST |
| | | YSLSSTLTLSKADYEKHKVYACEVTHQGLSSPVTKSFNRGEC |
| 948 | VHCDR1 Ab92 | SYAMH |
| 949 | VHCDR2 Ab92 | VISYDGSNKYYADSVKG |
| 950 | VLCDR3 Ab92 | GAGHGFPTGPDGFDI |
| 951 | VLCDR1 Ab92 | RSSRSLLHSDGKTYVY |
| 952 | VLCDR2 Ab92 | ELSNRFS |
| 953 | VLCDR3 Ab92 | MQYVEAPLT |
| 954 | VH Ab92 | EVQLLESGGGVVQPGRSLRLSCAASGFTFSSYAMHWVRQAPGKGLEWVAVISYDGSNKY |
| | | YADSVKGRFTISRDNSKNTLSLQMNSLRVEDTAIYYCVRGAGHGFPTGPDGFDIWGQGT |
| | | MVTVSS |
| 955 | VL Ab92 | DIVMTQTPLSLSVTPGQPASISCRSSRSLLHSDGKTYVYWYVQKSGQPPQLLIYELSNR |
| | | FSGVPDRFSGSGSRTDFTLKISRVEAEDVGVYYCMQYVEAPLTFGGGTKVEIK |
| 956 | HC Ab92 | EVQLLESGGGVVQPGRSLRLSCAASGFTFSSYAMHWVRQAPGKGLEWVAVISYDGSNKY |
| | | YADSVKGRFTISRDNSKNTLSLQMNSLRVEDTAIYYCVRGAGHGFPTGPDGFDIWGQGT |
| | | MVTVSSKGPSVFPLAPSSRSTSESTAALGCLVKDYFPEPVTVSWNSGALTSGVHTFPAV |
| | | LQSSGLYSLSSVVTVPSSNFGTQTYTCNVDHKPSNTKVDKTVERKCCVECPPCPAPPVA |
| | | GPSVFLFPPKPKDTLMISRTPEVTCVVVDVSHEDPEVQFNWYVDGVEVHNAKTKPREEQ |
| | | FNSTFRVVSVLTVVHQDWLNGKEYKCKVSNKGLPAPIEKTISKTKGQPREPQVYTLPPS |
| | | REEMTKNQVSLTCLVKGFYPSDIAVEWESNGQPENNYKTTPPMLDSDGSFFLYSKLTVD |
| | | KSRWQQGNVFSCSVMHEALHNHYTQKSLSLSPG |
| 957 | LC Ab92 | DIVMTQTPLSLSVTPGQPASISCRSSRSLLHSDGKTYVYWYVQKSGQPPQLLIYELSNR |
| | | FSGVPDRFSGSGSRTDFTLKISRVEAEDVGVYYCMQYVEAPLTFGGGTKVEIKRTVAAP |
| | | SVFIFPPSDEQLKSGTASVVCLLNNFYPREAKVQWKVDNALQSGNSQESVTEQDSKDST |
| | | YSLSSTLTLSKADYEKHKVYACEVTHQGLSSPVTKSFNRGEC |
| 958 | VHCDR1 Ab93 | SYAMH |
| 959 | VHCDR2 Ab93 | VISYDGSNKYYADSVKG |
| 960 | VLCDR3 Ab93 | GAGLGFPYGPDGFDI |
| 961 | VLCDR1 Ab93 | KSSRSLLHSDGKTYLY |
| 962 | VLCDR2 Ab93 | ELSNRFS |
| 963 | VLCDR3 Ab93 | MQYIEAPLT |
| 964 | VH Ab93 | EVQLLESGGGVVQPGRSLRLSCAASGFTFSSYAMHWVRQAPGKGLEWVAVISYDGSNKY |
| | | YADSVKGRFTISRDNSKNTLSLQMNSLRVEDTAIYYCVRGAGLGFPYGPDGFDIWGQGT |
| | | MVTVSS |
| 965 | VL Ab93 | DIVMTQTPLSLSVTPGQPASISCKSSRSLLHSDGKTYLYWYVQKSGQPPQLLIYELSNR |
| | | FSGVPDRFSGSGSRTDFTLKISRVEAEDVGVYYCMQYIEAPLTFGGGTKVEIK |
| 966 | HC Ab93 | EVQLLESGGGVVQPGRSLRLSCAASGFTFSSYAMHWVRQAPGKGLEWVAVISYDGSNKY |
| | | YADSVKGRFTISRDNSKNTLSLQMNSLRVEDTAIYYCVRGAGLGFPYGPDGFDIWGQGT |
| | | MVTVSSKGPSVFPLAPSSRSTSESTAALGCLVKDYFPEPVTVSWNSGALTSGVHTFPAV |
| | | LQSSGLYSLSSVVTVPSSNFGTQTYTCNVDHKPSNTKVDKTVERKCCVECPPCPAPPVA |
| | | GPSVFLFPPKPKDTLMISRTPEVTCVVVDVSHEDPEVQFNWYVDGVEVHNAKTKPREEQ |
| | | FNSTFRVVSVLTVVHQDWLNGKEYKCKVSNKGLPAPIEKTISKTKGQPREPQVYTLPPS |
| | | REEMTKNQVSLTCLVKGFYPSDIAVEWESNGQPENNYKTTPPMLDSDGSFFLYSKLTVD |
| | | KSRWQQGNVFSCSVMHEALHNHYTQKSLSLSPG |
| 967 | LC Ab93 | DIVMTQTPLSLSVTPGQPASISCKSSRSLLHSDGKTYLYWYVQKSGQPPQLLIYELSNR |
| | | FSGVPDRFSGSGSRTDFTLKISRVEAEDVGVYYCMQYIEAPLTFGGGTKVEIKRTVAAP |
| | | SVFIFPPSDEQLKSGTASVVCLLNNFYPREAKVQWKVDNALQSGNSQESVTEQDSKDST |
| | | YSLSSTLTLSKADYEKHKVYACEVTHQGLSSPVTKSFNRGEC |
| 968 | VHCDR1 Ab94 | SYAMH |
| 969 | VHCDR2 Ab94 | VISYDGSNKYYADSVKG |
| 970 | VLCDR3 Ab94 | GAGLGWPYGPDGFDI |
| 971 | VLCDR1 Ab94 | RSSRSLLHSDGKTYVY |
| 972 | VLCDR2 Ab94 | ELSNRFS |
| 973 | VLCDR3 Ab94 | MQYIEAPLT |
| 974 | VH Ab94 | EVQLLESGGGVVQPGRSLRLSCAASGFTFSSYAMHWVRQAPGKGLEWVAVISYDGSNKY |
| | | YADSVKGRFTISRDNSKNTLSLQMNSLRVEDTAIYYCVRGAGLGWPYGPDGFDIWGQGT |
| | | MVTVSS |
| 975 | VL Ab94 | DIVMTQTPLSLSVTPGQPASISCRSSRSLLHSDGKTYVYWYVQKSGQPPQLLIYELSNR |
| | | FSGVPDRFSGSGSRTDFTLKISRVEAEDVGVYYCMQYIEAPLTFGGGTKVEIK |
| 976 | HC Ab94 | EVQLLESGGGVVQPGRSLRLSCAASGFTFSSYAMHWVRQAPGKGLEWVAVISYDGSNKY |
| | | YADSVKGRFTISRDNSKNTLSLQMNSLRVEDTAIYYCVRGAGLGWPYGPDGFDIWGQGT |
| | | MVTVSSKGPSVFPLAPSSRSTSESTAALGCLVKDYFPEPVTVSWNSGALTSGVHTFPAV |
| | | LQSSGLYSLSSVVTVPSSNFGTQTYTCNVDHKPSNTKVDKTVERKCCVECPPCPAPPVA |
| | | GPSVFLFPPKPKDTLMISRTPEVTCVVVDVSHEDPEVQFNWYVDGVEVHNAKTKPREEQ |
| | | FNSTFRVVSVLTVVHQDWLNGKEYKCKVSNKGLPAPIEKTISKTKGQPREPQVYTLPPS |
| | | REEMTKNQVSLTCLVKGFYPSDIAVEWESNGQPENNYKTTPPMLDSDGSFFLYSKLTVD |
| | | KSRWQQGNVFSCSVMHEALHNHYTQKSLSLSPG |
| 977 | LC Ab94 | DIVMTQTPLSLSVTPGQPASISCRSSRSLLHSDGKTYVYWYVQKSGQPPQLLIYELSNR |
| | | FSGVPDRFSGSGSRTDFTLKISRVEAEDVGVYYCMQYIEAPLTFGGGTKVEIKRTVAAP |
| | | SVFIFPPSDEQLKSGTASVVCLLNNFYPREAKVQWKVDNALQSGNSQESVTEQDSKDST |
| | | YSLSSTLTLSKADYEKHKVYACEVTHQGLSSPVTKSFNRGEC |
| 978 | VHCDR1 Ab95 | SYAMH |
| 979 | VHCDR2 Ab95 | VISYDGSNKYYADSVKG |
| 980 | VLCDR3 Ab95 | GAGLGWPYGPDGFDI |
| 981 | VLCDR1 Ab95 | TSSRSLLHSDGKTYVY |
| 982 | VLCDR2 Ab95 | ELSNRFS |
| 983 | VLCDR3 Ab95 | MQYIEAPLT |
| 984 | VH Ab95 | EVQLLESGGGVVQPGRSLRLSCAASGFTFSSYAMHWVRQAPGKGLEWVAVISYDGSNKY |
| | | YADSVKGRFTISRDNSKNTLSLQMNSLRVEDTAIYYCVRGAGLGWPYGPDGFDIWGQGT |
| | | MVTVSS |
| 985 | VL Ab95 | DIVMTQTPLSLSVTPGQPASISCTSSRSLLHSDGKTYVYWYVQKSGQPPQLLIYELSNR |
| | | FSGVPDRFSGSGSRTDFTLKISRVEAEDVGVYYCMQYIEAPLTFGGGTKVEIK |
| 986 | HC Ab95 | EVQLLESGGGVVQPGRSLRLSCAASGFTFSSYAMHWVRQAPGKGLEWVAVISYDGSNKY |
| | | YADSVKGRFTISRDNSKNTLSLQMNSLRVEDTAIYYCVRGAGLGWPYGPDGFDIWGQGT |
| | | MVTVSSKGPSVFPLAPSSRSTSESTAALGCLVKDYFPEPVTVSWNSGALTSGVHTFPAV |
| | | LQSSGLYSLSSVVTVPSSNFGTQTYTCNVDHKPSNTKVDKTVERKCCVECPPCPAPPVA |
| | | GPSVFLFPPKPKDTLMISRTPEVTCVVVDVSHEDPEVQFNWYVDGVEVHNAKTKPREEQ |
| | | FNSTFRVVSVLTVVHQDWLNGKEYKCKVSNKGLPAPIEKTISKTKGQPREPQVYTLPPS |
| | | REEMTKNQVSLTCLVKGFYPSDIAVEWESNGQPENNYKTTPPMLDSDGSFFLYSKLTVD |
| | | KSRWQQGNVFSCSVMHEALHNHYTQKSLSLSPG |
| 987 | LC Ab95 | DIVMTQTPLSLSVTPGQPASISCTSSRSLLHSDGKTYVYWYVQKSGQPPQLLIYELSNR |
| | | FSGVPDRFSGSGSRTDFTLKISRVEAEDVGVYYCMQYIEAPLTFGGGTKVEIKRTVAAP |
| | | SVFIFPPSDEQLKSGTASVVCLLNNFYPREAKVQWKVDNALQSGNSQESVTEQDSKDST |
| | | YSLSSTLTLSKADYEKHKVYACEVTHQGLSSPVTKSFNRGEC |
| 988 | VHCDR1 Ab96 | SYAMH |
| 989 | VHCDR2 Ab96 | VISYDGSNKYYADSVKG |
| 990 | VLCDR3 Ab96 | GAGLGWPYGPDGFDI |
| 991 | VLCDR1 Ab96 | KSSRSLLHSDGKTYVY |
| 992 | VLCDR2 Ab96 | ELSNRFS |
| 993 | VLCDR3 Ab96 | MQYIEAPLT |
| 994 | VH Ab96 | EVQLLESGGGVVQPGRSLRLSCAASGFTFSSYAMHWVRQAPGKGLEWVAVISYDGSNKY |
| | | YADSVKGRFTISRDNSKNTLSLQMNSLRVEDTAIYYCVRGAGLGWPYGPDGFDIWGQGT |
| | | MVTVSS |
| 995 | VL Ab96 | DIVMTQTPLSLSVTPGQPASISCKSSRSLLHSDGKTYVYWYVQKSGQPPQLLIYELSNR |
| | | FSGVPDRFSGSGSRTDFTLKISRVEAEDVGVYYCMQYIEAPLTFGGGTKVEIK |
| 996 | HC Ab96 | EVQLLESGGGVVQPGRSLRLSCAASGFTFSSYAMHWVRQAPGKGLEWVAVISYDGSNKY |
| | | YADSVKGRFTISRDNSKNTLSLQMNSLRVEDTAIYYCVRGAGLGWPYGPDGFDIWGQGT |
| | | MVTVSSKGPSVFPLAPSSRSTSESTAALGCLVKDYFPEPVTVSWNSGALTSGVHTFPAV |
| | | LQSSGLYSLSSVVTVPSSNFGTQTYTCNVDHKPSNTKVDKTVERKCCVECPPCPAPPVA |
| | | GPSVFLFPPKPKDTLMISRTPEVTCVVVDVSHEDPEVQFNWYVDGVEVHNAKTKPREEQ |
| | | FNSTFRVVSVLTVVHQDWLNGKEYKCKVSNKGLPAPIEKTISKTKGQPREPQVYTLPPS |
| | | REEMTKNQVSLTCLVKGFYPSDIAVEWESNGQPENNYKTTPPMLDSDGSFFLYSKLTVD |
| | | KSRWQQGNVFSCSVMHEALHNHYTQKSLSLSPG |
| 997 | LC Ab96 | DIVMTQTPLSLSVTPGQPASISCKSSRSLLHSDGKTYVYWYVQKSGQPPQLLIYELSNR |
| | | FSGVPDRFSGSGSRTDFTLKISRVEAEDVGVYYCMQYIEAPLTFGGGTKVEIKRTVAAP |
| | | SVFIFPPSDEQLKSGTASVVCLLNNFYPREAKVQWKVDNALQSGNSQESVTEQDSKDST |
| | | YSLSSTLTLSKADYEKHKVYACEVTHQGLSSPVTKSFNRGEC |
| 998 | VHCDR1 Ab97 | SYAMH |
| 999 | VHCDR2 Ab97 | VISYDGSNKYYADSVKG |
| 1000 | VLCDR3 Ab97 | GAGLGWPYGPDGFDI |
| 1001 | VLCDR1 Ab97 | KSSRSLLHSDGKTYVY |
| 1002 | VLCDR2 Ab97 | ELSNRFS |
| 1003 | VLCDR3 Ab97 | MQYVEAPLT |
| 1004 | VH Ab97 | EVQLLESGGGVVQPGRSLRLSCAASGFTFSSYAMHWVRQAPGKGLEWVAVISYDGSNKY |
| | | YADSVKGRFTISRDNSKNTLSLQMNSLRVEDTAIYYCVRGAGLGWPYGPDGFDIWGQGT |
| | | MVTVSS |
| 1005 | VL Ab97 | DIVMTQTPLSLSVTPGQPASISCKSSRSLLHSDGKTYVYWYVQKSGQPPQLLIYELSNR |
| | | FSGVPDRFSGSGSRTDFTLKISRVEAEDVGVYYCMQYVEAPLTFGGGTKVEIK |
| 1006 | HC Ab97 | EVQLLESGGGVVQPGRSLRLSCAASGFTFSSYAMHWVRQAPGKGLEWVAVISYDGSNKY |
| | | YADSVKGRFTISRDNSKNTLSLQMNSLRVEDTAIYYCVRGAGLGWPYGPDGFDIWGQGT |
| | | MVTVSSKGPSVFPLAPSSRSTSESTAALGCLVKDYFPEPVTVSWNSGALTSGVHTFPAV |
| | | LQSSGLYSLSSVVTVPSSNFGTQTYTCNVDHKPSNTKVDKTVERKCCVECPPCPAPPVA |
| | | GPSVFLFPPKPKDTLMISRTPEVTCVVVDVSHEDPEVQFNWYVDGVEVHNAKTKPREEQ |
| | | FNSTFRVVSVLTVVHQDWLNGKEYKCKVSNKGLPAPIEKTISKTKGQPREPQVYTLPPS |
| | | REEMTKNQVSLTCLVKGFYPSDIAVEWESNGQPENNYKTTPPMLDSDGSFFLYSKLTVD |
| | | KSRWQQGNVFSCSVMHEALHNHYTQKSLSLSPG |
| 1007 | LC Ab97 | DIVMTQTPLSLSVTPGQPASISCKSSRSLLHSDGKTYVYWYVQKSGQPPQLLIYELSNR |
| | | FSGVPDRFSGSGSRTDFTLKISRVEAEDVGVYYCMQYVEAPLTFGGGTKVEIKRTVAAP |
| | | SVFIFPPSDEQLKSGTASVVCLLNNFYPREAKVQWKVDNALQSGNSQESVTEQDSKDST |
| | | YSLSSTLTLSKADYEKHKVYACEVTHQGLSSPVTKSFNRGEC |
| 1008 | VHCDR1 Ab98 | SYAMH |
| 1009 | VHCDR2 Ab98 | VISYDGSNKYYADSVKG |
| 1010 | VLCDR3 Ab98 | GAGLGWPYGPDGFDI |
| 1011 | VLCDR1 Ab98 | TSSRSLLHSDGKTYVY |
| 1012 | VLCDR2 Ab98 | ELSNRFS |
| 1013 | VLCDR3 Ab98 | MQYVEAPLT |
| 1014 | VH Ab98 | EVQLLESGGGVVQPGRSLRLSCAASGFTFSSYAMHWVRQAPGKGLEWVAVISYDGSNKY |
| | | YADSVKGRFTISRDNSKNTLSLQMNSLRVEDTAIYYCVRGAGLGWPYGPDGFDIWGQGT |
| | | MVTVSS |
| 1015 | VL Ab98 | DIVMTQTPLSLSVTPGQPASISCTSSRSLLHSDGKTYVYWYVQKSGQPPQLLIYELSNR |
| | | FSGVPDRFSGSGSRTDFTLKISRVEAEDVGVYYCMQYVEVPLTFGGGTKVEIK |
| 1016 | HC Ab98 | EVQLLESGGGVVQPGRSLRLSCAASGFTFSSYAMHWVRQAPGKGLEWVAVISYDGSNKY |
| | | YADSVKGRFTISRDNSKNTLSLQMNSLRVEDTAIYYCVRGAGLGWPYGPDGFDIWGQGT |
| | | MVTVSSKGPSVFPLAPSSRSTSESTAALGCLVKDYFPEPVTVSWNSGALTSGVHTFPAV |
| | | LQSSGLYSLSSVVTVPSSNFGTQTYTCNVDHKPSNTKVDKTVERKCCVECPPCPAPPVA |
| | | GPSVFLFPPKPKDTLMISRTPEVTCVVVDVSHEDPEVQFNWYVDGVEVHNAKTKPREEQ |
| | | FNSTFRVVSVLTVVHQDWLNGKEYKCKVSNKGLPAPIEKTISKTKGQPREPQVYTLPPS |
| | | REEMTKNQVSLTCLVKGFYPSDIAVEWESNGQPENNYKTTPPMLDSDGSFFLYSKLTVD |
| | | KSRWQQGNVFSCSVMHEALHNHYTQKSLSLSPG |
| 1017 | LC Ab98 | DIVMTQTPLSLSVTPGQPASISCTSSRSLLHSDGKTYVYWYVQKSGQPPQLLIYELSNR |
| | | FSGVPDRFSGSGSRTDFTLKISRVEAEDVGVYYCMQYVEVPLTFGGGTKVEIKRTVAAP |
| | | SVFIFPPSDEQLKSGTASVVCLLNNFYPREAKVQWKVDNALQSGNSQESVTEQDSKDST |
| | | YSLSSTLTLSKADYEKHKVYACEVTHQGLSSPVTKSFNRGEC |
| 1018 | VHCDR1 Ab99 | SYAMH |
| 1019 | VHCDR2 Ab99 | VISYDGSNKYYADSVKG |
| 1020 | VLCDR3 Ab99 | GAGLGWPYGPDGFDI |
| 1021 | VLCDR1 Ab99 | RSSRSLLWSDGKTYVY |
| 1022 | VLCDR2 Ab99 | ELSNRFS |
| 1023 | VLCDR3 Ab99 | MQYIEAPLT |
| 1024 | VH Ab99 | EVQLLESGGGVVQPGRSLRLSCAASGFTFSSYAMHWVRQAPGKGLEWVAVISYDGSNKY |
| | | YADSVKGRFTISRDNSKNTLSLQMNSLRVEDTAIYYCVRGAGLGWPYGPDGFDIWGQGT |
| | | MVTVSS |
| 1025 | VL Ab99 | DIVMTQTPLSLSVTPGQPASISCRSSRSLLWSDGKTYVYWYVQKSGQPPQLLIYELSNR |
| | | FSGVPDRFSGSGSRTDFTLKISRVEAEDVGVYYCMQYIEAPLTFGGGTKVEIK |
| 1026 | HC Ab99 | EVQLLESGGGVVQPGRSLRLSCAASGFTFSSYAMHWVRQAPGKGLEWVAVISYDGSNKY |
| | | YADSVKGRFTISRDNSKNTLSLQMNSLRVEDTAIYYCVRGAGLGWPYGPDGFDIWGQGT |
| | | MVTVSSKGPSVFPLAPSSRSTSESTAALGCLVKDYFPEPVTVSWNSGALTSGVHTFPAV |
| | | LQSSGLYSLSSVVTVPSSNFGTQTYTCNVDHKPSNTKVDKTVERKCCVECPPCPAPPVA |
| | | GPSVFLFPPKPKDTLMISRTPEVTCVVVDVSHEDPEVQFNWYVDGVEVHNAKTKPREEQ |
| | | FNSTFRVVSVLTVVHQDWLNGKEYKCKVSNKGLPAPIEKTISKTKGQPREPQVYTLPPS |
| | | REEMTKNQVSLTCLVKGFYPSDIAVEWESNGQPENNYKTTPPMLDSDGSFFLYSKLTVD |
| | | KSRWQQGNVFSCSVMHEALHNHYTQKSLSLSPG |
| 1027 | LC Ab99 | DIVMTQTPLSLSVTPGQPASISCRSSRSLLWSDGKTYVYWYVQKSGQPPQLLIYELSNR |
| | | FSGVPDRFSGSGSRTDFTLKISRVEAEDVGVYYCMQYIEAPLTFGGGTKVEIKRTVAAP |
| | | SVFIFPPSDEQLKSGTASVVCLLNNFYPREAKVQWKVDNALQSGNSQESVTEQDSKDST |
| | | YSLSSTLTLSKADYEKHKVYACEVTHQGLSSPVTKSFNRGEC |
| 1028 | VHCDR1 | SYAMH |
| | Ab100 | |
| 1029 | VHCDR2 | VISYDGSNKYYADSVKG |
| | Ab100 | |
| 1030 | VLCDR3 | GAGLGWPYGPDGFDI |
| | Ab100 | |
| 1031 | VLCDR1 | KSSRSLLWSDGKTYVY |
| | Ab100 | |
| 1032 | VLCDR2 | ELSNRFS |
| | Ab100 | |
| 1033 | VLCDR3 | MQYVEAPLT |
| | Ab100 | |
| 1034 | VH Ab100 | EVQLLESGGGVVQPGRSLRLSCAASGFTFSSYAMHWVRQAPGKGLEWVAVISYDGSNKY |
| | | YADSVKGRFTISRDNSKNTLSLQMNSLRVEDTAIYYCVRGAGLGWPYGPDGFDIWGQGT |
| | | MVTVSS |
| 1035 | VL Ab100 | DIVMTQTPLSLSVTPGQPASISCKSSRSLLWSDGKTYVYWYVQKSGQPPQLLIYELSNR |
| | | FSGVPDRFSGSGSRTDFTLKISRVEAEDVGVYYCMQYVEAPLTFGGGTKVEIK |
| 1036 | HC Ab100 | EVQLLESGGGVVQPGRSLRLSCAASGFTFSSYAMHWVRQAPGKGLEWVAVISYDGSNKY |
| | | YADSVKGRFTISRDNSKNTLSLQMNSLRVEDTAIYYCVRGAGLGWPYGPDGFDIWGQGT |
| | | MVTVSSKGPSVFPLAPSSRSTSESTAALGCLVKDYFPEPVTVSWNSGALTSGVHTFPAV |
| | | LQSSGLYSLSSVVTVPSSNFGTQTYTCNVDHKPSNTKVDKTVERKCCVECPPCPAPPVA |
| | | GPSVFLFPPKPKDTLMISRTPEVTCVVVDVSHEDPEVQFNWYVDGVEVHNAKTKPREEQ |
| | | FNSTFRVVSVLTVVHQDWLNGKEYKCKVSNKGLPAPIEKTISKTKGQPREPQVYTLPPS |
| | | REEMTKNQVSLTCLVKGFYPSDIAVEWESNGQPENNYKTTPPMLDSDGSFFLYSKLTVD |
| | | KSRWQQGNVFSCSVMHEALHNHYTQKSLSLSPG |
| 1037 | LC Ab100 | DIVMTQTPLSLSVTPGQPASISCKSSRSLLWSDGKTYVYWYVQKSGQPPQLLIYELSNR |
| | | FSGVPDRFSGSGSRTDFTLKISRVEAEDVGVYYCMQYVEAPLTFGGGTKVEIKRTVAAP |
| | | SVFIFPPSDEQLKSGTASVVCLLNNFYPREAKVQWKVDNALQSGNSQESVTEQDSKDST |
| | | YSLSSTLTLSKADYEKHKVYACEVTHQGLSSPVTKSFNRGEC |
| 1038 | VHCDR1 | SYAMH |
| | Ab101 | |
| 1039 | VHCDR2 | VISYDGSNKYYADSVKG |
| | Ab101 | |
| 1040 | VLCDR3 | GAGRGFTLGPDGFDI |
| | Ab101 | |
| 1041 | VLCDR1 | RSSRSLLHSDGKTYVY |
| | Ab101 | |
| 1042 | VLCDR2 | ELSNRFS |
| | Ab101 | |
| 1043 | VLCDR3 | MQYIEAPLT |
| | Ab101 | |
| 1044 | VH Ab101 | EVQLLESGGGVVQPGRSLRLSCAASGFTFSSYAMHWVRQAPGKGLEWVAVISYDGSNKY |
| | | YADSVKGRFTISRDNSKNTLSLQMNSLRVEDTAIYYCVRGAGRGFTLGPDGFDIWGQGT |
| | | MVTVSS |
| 1045 | VL Ab101 | DIVMTQTPLSLSVTPGQPASISCRSSRSLLHSDGKTYVYWYVQKSGQPPQLLIYELSNR |
| | | FSGVPDRFSGSGSRTDFTLKISRVEAEDVGVYYCMQYIEAPLTFGGGTKVEIK |
| 1046 | HC Ab101 | EVQLLESGGGVVQPGRSLRLSCAASGFTFSSYAMHWVRQAPGKGLEWVAVISYDGSNKY |
| | | YADSVKGRFTISRDNSKNTLSLQMNSLRVEDTAIYYCVRGAGRGFTLGPDGFDIWGQGT |
| | | MVTVSSKGPSVFPLAPSSRSTSESTAALGCLVKDYFPEPVTVSWNSGALTSGVHTFPAV |
| | | LQSSGLYSLSSVVTVPSSNFGTQTYTCNVDHKPSNTKVDKTVERKCCVECPPCPAPPVA |
| | | GPSVFLFPPKPKDTLMISRTPEVTCVVVDVSHEDPEVQFNWYVDGVEVHNAKTKPREEQ |
| | | FNSTFRVVSVLTVVHQDWLNGKEYKCKVSNKGLPAPIEKTISKTKGQPREPQVYTLPPS |
| | | REEMTKNQVSLTCLVKGFYPSDIAVEWESNGQPENNYKTTPPMLDSDGSFFLYSKLTVD |
| | | KSRWQQGNVFSCSVMHEALHNHYTQKSLSLSPG |
| 1047 | LC Ab101 | DIVMTQTPLSLSVTPGQPASISCRSSRSLLHSDGKTYVYWYVQKSGQPPQLLIYELSNR |
| | | FSGVPDRFSGSGSRTDFTLKISRVEAEDVGVYYCMQYIEAPLTFGGGTKVEIKRTVAAP |
| | | SVFIFPPSDEQLKSGTASVVCLLNNFYPREAKVQWKVDNALQSGNSQESVTEQDSKDST |
| | | YSLSSTLTLSKADYEKHKVYACEVTHQGLSSPVTKSFNRGEC |
| 1048 | VHCDR1 | SYAMH |
| | Ab102 | |
| 1049 | VHCDR2 | VISYDGSNKYYADSVKG |
| | Ab102 | |
| 1050 | VLCDR3 | GAGRGFTLGPDGFDI |
| | Ab102 | |
| 1051 | VLCDR1 | TSSRSLLHSDGKTYVY |
| | Ab102 | |
| 1052 | VLCDR2 | ELSNRFS |
| | Ab102 | |
| 1053 | VLCDR3 | MQYIEAPLT |
| | Ab102 | |
| 1054 | VH Ab102 | EVQLLESGGGVVQPGRSLRLSCAASGFTFSSYAMHWVRQAPGKGLEWVAVISYDGSNKY |
| | | YADSVKGRFTISRDNSKNTLSLQMNSLRVEDTAIYYCVRGAGRGFTLGPDGFDIWGQGT |
| | | MVTVSS |
| 1055 | VL Ab102 | DIVMTQTPLSLSVTPGQPASISCTSSRSLLHSDGKTYVYWYVQKSGQPPQLLIYELSNR |
| | | FSGVPDRFSGSGSRTDFTLKISRVEAEDVGVYYCMQYIEAPLTFGGGTKVEIK |
| 1056 | HC Ab102 | EVQLLESGGGVVQPGRSLRLSCAASGFTFSSYAMHWVRQAPGKGLEWVAVISYDGSNKY |
| | | YADSVKGRFTISRDNSKNTLSLQMNSLRVEDTAIYYCVRGAGRGFTLGPDGFDIWGQGT |
| | | MVTVSSKGPSVFPLAPSSRSTSESTAALGCLVKDYFPEPVTVSWNSGALTSGVHTFPAV |
| | | LQSSGLYSLSSVVTVPSSNFGTQTYTCNVDHKPSNTKVDKTVERKCCVECPPCPAPPVA |
| | | GPSVFLFPPKPKDTLMISRTPEVTCVVVDVSHEDPEVQFNWYVDGVEVHNAKTKPREEQ |
| | | FNSTFRVVSVLTVVHQDWLNGKEYKCKVSNKGLPAPIEKTISKTKGQPREPQVYTLPPS |
| | | REEMTKNQVSLTCLVKGFYPSDIAVEWESNGQPENNYKTTPPMLDSDGSFFLYSKLTVD |
| | | KSRWQQGNVFSCSVMHEALHNHYTQKSLSLSPG |
| 1057 | LC Ab102 | DIVMTQTPLSLSVTPGQPASISCTSSRSLLHSDGKTYVYWYVQKSGQPPQLLIYELSNR |
| | | FSGVPDRFSGSGSRTDFTLKISRVEAEDVGVYYCMQYIEAPLTFGGGTKVEIKRTVAAP |
| | | SVFIFPPSDEQLKSGTASVVCLLNNFYPREAKVQWKVDNALQSGNSQESVTEQDSKDST |
| | | YSLSSTLTLSKADYEKHKVYACEVTHQGLSSPVTKSFNRGEC |
| 1058 | VHCDR1 | SYAMH |
| | Ab103 | |
| 1059 | VHCDR2 | VISYDGSNKYYADSVKG |
| | Ab103 | |
| 1060 | VLCDR3 | GAGRGFTLGPDGFDI |
| | Ab103 | |
| 1061 | VLCDR1 | KSSRSLLHSDGKTYVY |
| | Ab103 | |
| 1062 | VLCDR2 | ELSNRFS |
| | Ab103 | |
| 1063 | VLCDR3 | MQYIEAPLT |
| | Ab103 | |
| 1064 | VH Ab103 | EVQLLESGGGVVQPGRSLRLSCAASGFTFSSYAMHWVRQAPGKGLEWVAVISYDGSNKY |
| | | YADSVKGRFTISRDNSKNTLSLQMNSLRVEDTAIYYCVRGAGRGFTLGPDGFDIWGQGT |
| | | MVTVSS |
| 1065 | VL Ab103 | DIVMTQTPLSLSVTPGQPASISCKSSRSLLHSDGKTYVYWYVQKSGQPPQLLIYELSNR |
| | | FSGVPDRFSGSGSRTDFTLKISRVEAEDVGVYYCMQYIEAPLTFGGGTKVEIK |
| 1066 | HC Ab103 | EVQLLESGGGVVQPGRSLRLSCAASGFTFSSYAMHWVRQAPGKGLEWVAVISYDGSNKY |
| | | YADSVKGRFTISRDNSKNTLSLQMNSLRVEDTAIYYCVRGAGRGFTLGPDGFDIWGQGT |
| | | MVTVSSKGPSVFPLAPSSRSTSESTAALGCLVKDYFPEPVTVSWNSGALTSGVHTFPAV |
| | | LQSSGLYSLSSVVTVPSSNFGTQTYTCNVDHKPSNTKVDKTVERKCCVECPPCPAPPVA |
| | | GPSVFLFPPKPKDTLMISRTPEVTCVVVDVSHEDPEVQFNWYVDGVEVHNAKTKPREEQ |
| | | FNSTFRVVSVLTVVHQDWLNGKEYKCKVSNKGLPAPIEKTISKTKGQPREPQVYTLPPS |
| | | REEMTKNQVSLTCLVKGFYPSDIAVEWESNGQPENNYKTTPPMLDSDGSFFLYSKLTVD |
| | | KSRWQQGNVFSCSVMHEALHNHYTQKSLSLSPG |
| 1067 | LC Ab103 | DIVMTQTPLSLSVTPGQPASISCKSSRSLLHSDGKTYVYWYVQKSGQPPQLLIYELSNR |
| | | FSGVPDRFSGSGSRTDFTLKISRVEAEDVGVYYCMQYIEAPLTFGGGTKVEIKRTVAAP |
| | | SVFIFPPSDEQLKSGTASVVCLLNNFYPREAKVQWKVDNALQSGNSQESVTEQDSKDST |
| | | YSLSSTLTLSKADYEKHKVYACEVTHQGLSSPVTKSFNRGEC |
| 1068 | VHCDR1 | SYAMH |
| | Ab104 | |
| 1069 | VHCDR2 | VISYDGSNKYYADSVKG |
| | Ab104 | |
| 1070 | VLCDR3 | GAGRGFTLGPDGFDI |
| | Ab104 | |
| 1071 | VLCDR1 | KSSRSLLHSDGKTYVY |
| | Ab104 | |
| 1072 | VLCDR2 | ELSNRFS |
| | Ab104 | |
| 1073 | VLCDR3 | MQYVEAPLT |
| | Ab104 | |
| 1074 | VH Ab104 | EVQLLESGGGVVQPGRSLRLSCAASGFTFSSYAMHWVRQAPGKGLEWVAVISYDGSNKY |
| | | YADSVKGRFTISRDNSKNTLSLQMNSLRVEDTAIYYCVRGAGRGFTLGPDGFDIWGQGT |
| | | MVTVSS |
| 1075 | VL Ab104 | DIVMTQTPLSLSVTPGQPASISCKSSRSLLHSDGKTYVYWYVQKSGQPPQLLIYELSNR |
| | | FSGVPDRFSGSGSRTDFTLKISRVEAEDVGVYYCMQYVEAPLTFGGGTKVEIK |
| 1076 | HC Ab104 | EVQLLESGGGVVQPGRSLRLSCAASGFTFSSYAMHWVRQAPGKGLEWVAVISYDGSNKY |
| | | YADSVKGRFTISRDNSKNTLSLQMNSLRVEDTAIYYCVRGAGRGFTLGPDGFDIWGQGT |
| | | MVTVSSKGPSVFPLAPSSRSTSESTAALGCLVKDYFPEPVTVSWNSGALTSGVHTFPAV |
| | | LQSSGLYSLSSVVTVPSSNFGTQTYTCNVDHKPSNTKVDKTVERKCCVECPPCPAPPVA |
| | | GPSVFLFPPKPKDTLMISRTPEVTCVVVDVSHEDPEVQFNWYVDGVEVHNAKTKPREEQ |
| | | FNSTFRVVSVLTVVHQDWLNGKEYKCKVSNKGLPAPIEKTISKTKGQPREPQVYTLPPS |
| | | REEMTKNQVSLTCLVKGFYPSDIAVEWESNGQPENNYKTTPPMLDSDGSFFLYSKLTVD |
| | | KSRWQQGNVFSCSVMHEALHNHYTQKSLSLSPG |
| 1077 | LC Ab104 | DIVMTQTPLSLSVTPGQPASISCKSSRSLLHSDGKTYVYWYVQKSGQPPQLLIYELSNR |
| | | FSGVPDRFSGSGSRTDFTLKISRVEAEDVGVYYCMQYVEAPLTFGGGTKVEIKRTVAAP |
| | | SVFIFPPSDEQLKSGTASVVCLLNNFYPREAKVQWKVDNALQSGNSQESVTEQDSKDST |
| | | YSLSSTLTLSKADYEKHKVYACEVTHQGLSSPVTKSFNRGEC |
| 1078 | VHCDR1 | SYAMH |
| | Ab105 | |
| 1079 | VHCDR2 | VISYDGSNKYYADSVKG |
| | Ab105 | |
| 1080 | VLCDR3 | GAGRGFTLGPDGFDI |
| | Ab105 | |
| 1081 | VLCDR1 | TSSRSLLHSDGKTYVY |
| | Ab105 | |
| 1082 | VLCDR2 | ELSNRFS |
| | Ab105 | |
| 1083 | VLCDR3 | MQYVEAPLT |
| | Ab105 | |
| 1084 | VH Ab105 | EVQLLESGGGVVQPGRSLRLSCAASGFTFSSYAMHWVRQAPGKGLEWVAVISYDGSNKY |
| | | YADSVKGRFTISRDNSKNTLSLQMNSLRVEDTAIYYCVRGAGRGFTLGPDGFDIWGQGT |
| | | MVTVSS |
| 1085 | VL Ab105 | DIVMTQTPLSLSVTPGQPASISCTSSRSLLHSDGKTYVYWYVQKSGQPPQLLIYELSNR |
| | | FSGVPDRFSGSGSRTDFTLKISRVEAEDVGVYYCMQYVEVPLTFGGGTKVEIK |
| 1086 | HC Ab105 | EVQLLESGGGVVQPGRSLRLSCAASGFTFSSYAMHWVRQAPGKGLEWVAVISYDGSNKY |
| | | YADSVKGRFTISRDNSKNTLSLQMNSLRVEDTAIYYCVRGAGRGFTLGPDGFDIWGQGT |
| | | MVTVSSKGPSVFPLAPSSRSTSESTAALGCLVKDYFPEPVTVSWNSGALTSGVHTFPAV |
| | | LQSSGLYSLSSVVTVPSSNFGTQTYTCNVDHKPSNTKVDKTVERKCCVECPPCPAPPVA |
| | | GPSVFLFPPKPKDTLMISRTPEVTCVVVDVSHEDPEVQFNWYVDGVEVHNAKTKPREEQ |
| | | FNSTFRVVSVLTVVHQDWLNGKEYKCKVSNKGLPAPIEKTISKTKGQPREPQVYTLPPS |
| | | REEMTKNQVSLTCLVKGFYPSDIAVEWESNGQPENNYKTTPPMLDSDGSFFLYSKLTVD |
| | | KSRWQQGNVFSCSVMHEALHNHYTQKSLSLSPG |
| 1087 | LC Ab105 | DIVMTQTPLSLSVTPGQPASISCTSSRSLLHSDGKTYVYWYVQKSGQPPQLLIYELSNR |
| | | FSGVPDRFSGSGSRTDFTLKISRVEAEDVGVYYCMQYVEVPLTFGGGTKVEIKRTVAAP |
| | | SVFIFPPSDEQLKSGTASVVCLLNNFYPREAKVQWKVDNALQSGNSQESVTEQDSKDST |
| | | YSLSSTLTLSKADYEKHKVYACEVTHQGLSSPVTKSFNRGEC |
| 1088 | VHCDR1 | SYAMH |
| | Ab106 | |
| 1089 | VHCDR2 | VISYDGSNKYYADSVKG |
| | Ab106 | |
| 1090 | VLCDR3 | GAGRGFTLGPDGFDI |
| | Ab106 | |
| 1091 | VLCDR1 | RSSRSLLWSDGKTYVY |
| | Ab106 | |
| 1092 | VLCDR2 | ELSNRFS |
| | Ab106 | |
| 1093 | VLCDR3 | MQYIEAPLT |
| | Ab106 | |
| 1094 | VH Ab106 | EVQLLESGGGVVQPGRSLRLSCAASGFTFSSYAMHWVRQAPGKGLEWVAVISYDGSNKY |
| | | YADSVKGRFTISRDNSKNTLSLQMNSLRVEDTAIYYCVRGAGRGFTLGPDGFDIWGQGT |
| | | MVTVSS |
| 1095 | VL Ab106 | DIVMTQTPLSLSVTPGQPASISCRSSRSLLWSDGKTYVYWYVQKSGQPPQLLIYELSNR |
| | | FSGVPDRFSGSGSRTDFTLKISRVEAEDVGVYYCMQYIEAPLTFGGGTKVEIK |
| 1096 | HC Ab106 | EVQLLESGGGVVQPGRSLRLSCAASGFTFSSYAMHWVRQAPGKGLEWVAVISYDGSNKY |
| | | YADSVKGRFTISRDNSKNTLSLQMNSLRVEDTAIYYCVRGAGRGFTLGPDGFDIWGQGT |
| | | MVTVSSKGPSVFPLAPSSRSTSESTAALGCLVKDYFPEPVTVSWNSGALTSGVHTFPAV |
| | | LQSSGLYSLSSVVTVPSSNFGTQTYTCNVDHKPSNTKVDKTVERKCCVECPPCPAPPVA |
| | | GPSVFLFPPKPKDTLMISRTPEVTCVVVDVSHEDPEVQFNWYVDGVEVHNAKTKPREEQ |
| | | FNSTFRVVSVLTVVHQDWLNGKEYKCKVSNKGLPAPIEKTISKTKGQPREPQVYTLPPS |
| | | REEMTKNQVSLTCLVKGFYPSDIAVEWESNGQPENNYKTTPPMLDSDGSFFLYSKLTVD |
| | | KSRWQQGNVFSCSVMHEALHNHYTQKSLSLSPG |
| 1097 | LC Ab106 | DIVMTQTPLSLSVTPGQPASISCRSSRSLLWSDGKTYVYWYVQKSGQPPQLLIYELSNR |
| | | FSGVPDRFSGSGSRTDFTLKISRVEAEDVGVYYCMQYIEAPLTFGGGTKVEIKRTVAAP |
| | | SVFIFPPSDEQLKSGTASVVCLLNNFYPREAKVQWKVDNALQSGNSQESVTEQDSKDST |
| | | YSLSSTLTLSKADYEKHKVYACEVTHQGLSSPVTKSFNRGEC |
| 1098 | VHCDR1 | SYAMH |
| | Ab107 | |
| 1099 | VHCDR2 | VISYDGSNKYYADSVKG |
| | Ab107 | |
| 1100 | VLCDR3 | GAGRGFTLGPDGFDI |
| | Ab107 | |
| 1101 | VLCDR1 | KSSRSLLWSDGKTYVY |
| | Ab107 | |
| 1102 | VLCDR2 | ELSNRFS |
| | Ab107 | |
| 1103 | VLCDR3 | MQYVEAPLT |
| | Ab107 | |
| 1104 | VH Ab107 | EVQLLESGGGVVQPGRSLRLSCAASGFTFSSYAMHWVRQAPGKGLEWVAVISYDGSNKY |
| | | YADSVKGRFTISRDNSKNTLSLQMNSLRVEDTAIYYCVRGAGRGFTLGPDGFDIWGQGT |
| | | MVTVSS |
| 1105 | VL Ab107 | DIVMTQTPLSLSVTPGQPASISCKSSRSLLWSDGKTYVYWYVQKSGQPPQLLIYELSNR |
| | | FSGVPDRFSGSGSRTDFTLKISRVEAEDVGVYYCMQYVEAPLTFGGGTKVEIK |
| 1106 | HC Ab107 | EVQLLESGGGVVQPGRSLRLSCAASGFTFSSYAMHWVRQAPGKGLEWVAVISYDGSNKY |
| | | YADSVKGRFTISRDNSKNTLSLQMNSLRVEDTAIYYCVRGAGRGFTLGPDGFDIWGQGT |
| | | MVTVSSKGPSVFPLAPSSRSTSESTAALGCLVKDYFPEPVTVSWNSGALTSGVHTFPAV |
| | | LQSSGLYSLSSVVTVPSSNFGTQTYTCNVDHKPSNTKVDKTVERKCCVECPPCPAPPVA |
| | | GPSVFLFPPKPKDTLMISRTPEVTCVVVDVSHEDPEVQFNWYVDGVEVHNAKTKPREEQ |
| | | FNSTFRVVSVLTVVHQDWLNGKEYKCKVSNKGLPAPIEKTISKTKGQPREPQVYTLPPS |
| | | REEMTKNQVSLTCLVKGFYPSDIAVEWESNGQPENNYKTTPPMLDSDGSFFLYSKLTVD |
| | | KSRWQQGNVFSCSVMHEALHNHYTQKSLSLSPG |
| 1107 | LC Ab107 | DIVMTQTPLSLSVTPGQPASISCKSSRSLLWSDGKTYVYWYVQKSGQPPQLLIYELSNR |
| | | FSGVPDRFSGSGSRTDFTLKISRVEAEDVGVYYCMQYVEAPLTFGGGTKVEIKRTVAAP |
| | | SVFIFPPSDEQLKSGTASVVCLLNNFYPREAKVQWKVDNALQSGNSQESVTEQDSKDST |
| | | YSLSSTLTLSKADYEKHKVYACEVTHQGLSSPVTKSFNRGEC |
| 1108 | Vh1 CDR1 | SYAMH |
| 1109 | Vh1 CDR2 | VISYDGSNKYYADSVKG |
| 1110 | Vh1 CDR3 | GAGRGYTYGPDGFDI |
| 1111 | Vh1 | EVQLVESGGGVVQPGRSLRLSCAASGFTFSSYAMHWVRQAPGKGLEWVAVISYDGSNKY |
| | | YADSVKGRFTISRDNSKNTLYLQMNSLRAEDTAIYYCVRGAGRGYTYGPDGFDIWGQGT |
| | | MVTVSS |
| 1112 | Vh2 CDR1 | SYAMH |
| 1113 | Vh2 CDR2 | VISYDGSNKYYADSVKG |
| 1114 | Vh2 CDR3 | GAGRGYTYGPDGFDI |
| 1115 | Vh2 | EVQLVESGGGVVQPGRSLRLSCAASGFTFSSYAMHWVRQAPGKGLEWVAVISYDGSNKY |
| | | YADSVKGRFTISRDNSKNTLYLQMNSLRAEDTAVYYCARGAGRGYTYGPDGFDIWGQGT |
| | | MVTVSS |
| 1116 | Vk1 CDR1 | TSSRSLLHSDGKTYLY |
| 1117 | Vk1 CDR2 | ELSNRFS |
| 1118 | Vk1 CDR3 | MQYIEAPLT |
| 1119 | Vk1 | DIVMTQTPLSLSVTPGQPASISCTSSRSLLHSDGKTYLYWYLQKPGQPPQLLIYELSNR |
| | | FSGVPDRFSGSGSRTDFTLKISRVEAEDVGVYYCMQYIEAPLTFGGGTKVEIK |
| 1120 | Vk2 CDR1 | TSSRSLLHSDGKTYVY |
| 1121 | Vk2 CDR2 | ELSNRFS |
| 1122 | Vk2 CDR3 | MQYIEAPLT |
| 1123 | Vk2 | DIVMTQTPLSLSVTPGQPASISCTSSRSLLHSDGKTYVYWYLQKPGQPPQLLIYELSNR |
| | | FSGVPDRFSGSGSRTDFTLKISRVEAEDVGVYYCMQYIEAPLTFGGGTKVEIK |
| 1124 | Vk3 CDR1 | TSSRSLLHSDGKTYVY |
| 1125 | Vk3 CDR2 | ELSNRFS |
| 1126 | Vk3 CDR3 | MQYIEAPLT |
| 1127 | Vk3 | DIVMTQTPLSLSVTPGQPASISCTSSRSLLHSDGKTYVYWYLQKSGQPPQLLIYELSNR |
| | | FSGVPDRFSGSGSRTDFTLKISRVEAEDVGVYYCMQYIEAPLTFGGGTKVEIK |
| 1128 | Vk4 CDR1 | TSSRSLLHSDGKTYVY |
| 1129 | Vk4 CDR2 | ELSNRFS |
| 1130 | Vk4 CDR3 | MQYIEAPLT |
| 1131 | Vk4 | DIVMTQTPLSLSVTPGQPASISCTSSRSLLHSDGKTYVYWYVQKPGQPPQLLIYELSNR |
| | | FSGVPDRFSGSGSRTDFTLKISRVEAEDVGVYYCMQYIEAPLTFGGGTKVEIK |
| 1132 | Vk5 CDR1 | RSSRSLLHSDGKTYVY |
| 1133 | Vk5 CDR2 | ELSNRFS |
| 1134 | Vk5 CDR3 | MQYIEAPLT |
| 1135 | Vk5 | DIVMTQTPLSLSVTPGQPASISCRSSRSLLHSDGKTYVYWYLQKPGQPPQLLIYELSNR |
| | | FSGVPDRFSGSGSGTDFTLKISRVEAEDVGVYYCMQYIEAPLTFGGGTKVEIK |
| 1136 | Vk6 CDR1 | KSSQSLLHSDGKTYLY |
| 1137 | Vk6 CDR2 | ELSNRFS |
| 1138 | Vk6 CDR3 | MQYIEAPLT |
| 1139 | Vk6 | DIVMTQTPLSLSVTPGQPASISCKSSQSLLHSDGKTYLYWYLQKPGQPPQLLIYELSNR |
| | | FSGVPDRFSGSGSGTDFTLKISRVEAEDVGVYYCMQYIEAPLTFGGGTKVEIK |
| 1140 | Vk7 CDR1 | KSSQSLLHSDGKTYLY |
| 1141 | Vk7 CDR2 | ELSNRFS |
| 1142 | Vk7 CDR3 | MQYIEAPLT |
| 1143 | Vk7 | DIVMTQSPLSLPVTPGEPASISCKSSQSLLHSDGKTYLYWYLQKPGQPPQLLIYELSNR |
| | | FSGVPDRFSGSGSGTDFTLKISRVEAEDVGVYYCMQYIEAPLTFGGGTKVEIK |
| 1144 | Vk8 CDR1 | TSSRSLLHSDGKTYVY |
| 1145 | Vk8 CDR2 | YLGNRFS |
| 1146 | Vk8 CDR3 | MQYIEAPLT |
| 1147 | Vk8 | DIVMTQTPLSLSVTPGQPASISCTSSRSLLHSDGKTYVYWYLQKPGQPPQLLIIYLGNR |
| | | FSGVPDRFSGSGSRTDFTLKISRVEAEDVGVYYCMQYIEAPLTFGGGTKVEIK |
| 1148 | Vk9 CDR1 | TSSRSLLHSDGKTYVY |
| 1149 | Vk9 CDR2 | ELSNRFS |
| 1150 | Vk9 CDR3 | MQYIEAPLT |
| 1151 | Vk9 | DIVMTQSPDSLAVSLGERATINCKSSQSLLHSDGKTYVYWYQQKPGQPPKLLIYELSNR |
| | | FSGVPDRFSGSGSGTDFTLTISSLQAEDVAVYYCMQYIEAPLTFGGGTKVEIK |
| 1152 | Vk10 CDR1 | TSSRSLLHSDGKTYVY |
| 1153 | Vk10 CDR2 | ELSNRFS |
| 1154 | Vk10 CDR3 | MQYIEAPLT |
| 1155 | Vk10 | DIVMTQSPDSLAVSLGERATISCTSSRSLLHSDGKTYVYWYQQKPGQPPKLLIYELSNR |
| | | FSGVPDRFSGSGSRTDFTLTISSLQAEDVAVYYCMQYIEAPLTFGGGTKVEIK |
| 1156 | Vk11 CDR1 | TSSRSLLHSDGKTYVY |
| 1157 | Vk11 CDR2 | ELSNRFS |
| 1158 | Vk11 CDR3 | MQYIEAPLT |
| 1159 | Vk11 | DIVMTQSPLSLPVTPGEPASISCTSSRSLLHSDGKTYVYWYLQKPGQSPQVLIYELSNR |
| | | FSGVPDRFSGSGSGTDFTLKISRVEAEDVGVYYCMQYIEAPLTFGGGTKVEIK |
| 1160 | Vk12 CDR1 | TSSRSLLHSDGKTYVY |
| 1161 | Vk12 CDR2 | ELSNRFS |
| 1162 | Vk12 CDR3 | MQYIEAPLT |
| 1163 | Vk12 | DIVMTQSPLSLPVTPGEPASISCTSSRSLLHSDGKTYVYWYLQKPGQSPQLLIYELSNR |
| | | FSGVPDRFSGSGSGTDFTLKISRVEAEDVGVYYCMQYIEAPLTFGGGTKVEIK |
| 1164 | Vk13 CDR1 | TSSRSLLHSDGKTYVY |
| 1165 | Vk13 CDR2 | ELSNRFS |
| 1166 | Vk13 CDR3 | MQYIEAPLT |
| 1167 | Vk13 | DVVMTQSPLSLPVTLGQPASISCTSSRSLLHSDGKTYVYWFQQRPGQSPRRLIYELSNR |
| | | FSGVPDRFSGSGSGTDFTLKISRVEAEDVGVYYCMQYIEAPLTFGGGTKVEIK |

Constant regions

| | | |
|---|---|---|
| 1168 | human IgG1 | ASTKGPSVFPLAPSSKSTSGGTAALGCLVKDYFPEPVTVSWNSGALTSGVHTFPAVLQ |
| | constant | SSGLYSLSSVVTVPSSSLGTQTYICNVNHKPSNTKVDKKVEPKSCDKTHTCPPCPAPE |
| | region | LLGGPSVFLFPPKPKDTLMISRTPEVTCVVVDVSHEDPEVKFNWYVDGVEVHNAKTKP |
| | | REEQYNSTYRVVSVLTVLHQDWLNGKEYKCKVSNKALPAPIEKTISKAKGQPREPQVY |
| | | TLPPSRDELTKNQVSLTCLVKGFYPSDIAVEWESNGQPENNYKTTPPVLDSDGSFFLY |
| | | SKLTVDKSRWQQGNVFSCSVMHEALHNHYTQKSLSLSPG |
| 1169 | human IgG2 | ASTKGPSVFPLAPCSRSTSESTAALGCLVKDYFPEPVTVSWNSGALTSGVHTFPAVLQ |
| | constant | SSGLYSLSSVVTVPSSNFGTQTYTCNVDHKPSNTKVDKTVERKCCVECPPCPAPPVAG |
| | region | PSVFLFPPKPKDTLMISRTPEVTCVVVDVSHEDPEVQFNWYVDGVEVHNAKTKPREEQ |
| | | FNSTFRVVSVLTVVHQDWLNGKEYKCKVSNKGLPAPIEKTISKTKGQPREPQVYTLPP |
| | | SREEMTKNQVSLTCLVKGFYPSDIAVEWESNGQPENNYKTTPPMLDSDGSFFLYSKLT |
| | | VDKSRWQQGNVFSCSVMHEALHNHYTQKSLSLSPG |
| 1170 | human IgG3 | ASTKGPSVFPLAPCSRSTSGGTAALGCLVKDYFPEPVTVSWNSGALTSGVHTFPAVLQ |
| | constant | SSGLYSLSSVVTVPSSSLGTQTYTCNVNHKPSNTKVDKRVELKTPLGDTTHTCPRCPE |
| | region | PKSCDTPPPCPRCPEPKSCDTPPPCPRCPEPKSCDTPPPCPRCPAPELLGGPSVFLFP |
| | | PKPKDTLMISRTPEVTCVVVDVSHEDPEVQFKWYVDGVEVHNAKTKPREEQYNSTFRV |
| | | VSVLTVLHQDWLNGKEYKCKVSNKALPAPIEKTISKTKGQPREPQVYTLPPSREEMTK |
| | | NQVSLTCLVKGFYPSDIAVEWESSGQPENNYNTTPPMLDSDGSFFLYSKLTVDKSRWQ |
| | | QGNIFSCSVMHEALHNRFTQKSLSLSPG |
| 1171 | human IgG4 | ASTKGPSVFPLAPCSRSTSESTAALGCLVKDYFPEPVTVSWNSGALTSGVHTFPAVLQ |
| | constant | SSGLYSLSSVVTVPSSSLGTKTYTCNVDHKPSNTKVDKRVESKYGPPCPSCPAPEFLG |
| | region | GPSVFLFPPKPKDTLMISRTPEVTCVVVDVSQEDPEVQFNWYVDGVEVHNAKTKPREE |
| | | QFNSTYRVVSVLTVLHQDWLNGKEYKCKVSNKGLPSSIEKTISKAKGQPREPQVYTLP |
| | | PSQEEMTKNQVSLTCLVKGFYPSDIAVEWESNGQPENNYKTTPPVLDSDGSFFLYSRL |
| | | TVDKSRWQEGNVFSCSVMHEALHNHYTQKSLSLSLG |
| 1172 | M5 | ASTKGPSVFPLAPSSRSTSESTAALGCLVKDYFPEPVTVSWNSGALTSGVHTFPAVLQ |
| | | SSGLYSLSSVVTVPSSNFGTQTYTCNVDHKPSNTKVDKTVERKCCVECPPCPAPPVAG |
| | | PSVFLFPPKPKDTLMISRTPEVTCVVVDVSQEDPEVQFNWYVDGVEVHNAKTKPREEQ |
| | | FNSTFRVVSVLTVLHQDWLNGKEYKCKVSNKGLPSSIEKTISKTKGQPREPQVYTLPP |
| | | SREEMTKNQVSLTCLVKGFYPSDIAVEWESNGQPENNYKTTPPMLDSDGSFFLYSKLT |
| | | VDKSRWQQGNVFSCSVMHEALHNHYTQKSLSLSPG |
| 1173 | IgG2 | ASTKGPSVFPLAPSSRSTSESTAALGCLVKDYFPEPVTVSWNSGALTSGVHTFPAVLQS |
| | (C127S) | SGLYSLSSVVTVPSSNFGTQTYTCNVDHKPSNTKVDKTVERKCCVECPPCPAPPVAGPS |
| | (M7) | VFLFPPKPKDTLMISRTPEVTCVVVDVSHEDPEVQFNWYVDGVEVHNAKTKPREEQFNS |
| | | TFRVVSVLTVVHQDWLNGKEYKCKVSNKGLPAPIEKTISKTKGQPREPQVYTLPPSREE |
| | | MTKNQVSLTCLVKGFYPSDIAVEWESNGQPENNYKTTPPMLDSDGSFFLYSKLTVDKSR |
| | | WQQGNVFSCSVMHEALHNHYTQKSLSLSPG |
| 1174 | IgG1_IgG4 | ASTKGPSVFPLAPSSKSTSGGTAALGCLVKDYFPEPVTVSWNSGALTSGVHTFPAVLQS |
| | Fc region | SGLYSLSSVVTVPSSSLGTQTYICNVNHKPSNTKVDKKVEPKSCDKTHTCPSCPAPEAA |
| | (M9) | GGPSVFLFPPKPKDTLMISRTPEVTCVVVDVSQEDPEVQFNWYVDGVEVHNAKTKPREE |
| | | QFNSTYRVVSVLTVLHQDWLNGKEYKCKVSNKGLPSSIEKTISKAKGQPREPQVYTLPP |
| | | SREEMTKNQVSLTCLVKGFYPSDIAVEWESNGQP |
| | | ENNYKTTPPVLDSDGSFFLYSKLTVDKSRWQQGNVFSCSVMHEALHNHYTQKSLSLSPG |
| 1175 | IgG1 | ASTKGPSVFPLAPSSKSTSGGTAALGCLVKDYFPEPVTVSWNSGALTSGVHTFPAVLQS |
| | (D265A/N297Q) | SGLYSLSSVVTVPSSSLGTQTYICNVNHKPSNTKVDKKVEPKSCDKTHTCPPCPAPELL |
| | (M11) | GGPSVFLFPPKPKDTLMISRTPEVTCVVVAVSHEDPEVKFNWYVDGVEVHNAKTKPREE |
| | | QYQSTYRVVSVLTVLHQDWLNGKEYKCKVSNKALPAPIEKTISKAKGQPREPQVYTLPP |
| | | SREEMTKNQVSLTCLVKGFYPSDIAVEWESNGQPENNYKTTPPVLDSDGSFFLYSKLTV |
| | | DKSRWQQGNVFSCSVMHEALHNHYTQKSLSLSPG |

Nucleic acids

| | | |
|---|---|---|
| 1176 | VH Ab16 | GAAGTGCAGCTGCTGGAAAGCGGCGGCGGCGTGGTGCAGCCGGGCCGTAGCCTGCGTCTGAG |
| | | CTGCGCGGCGAGCGGCTTTACCTTTAGCAGCTATGCGatgCATTGGGTGCGTCAGGCGCCGG |
| | | GCAAAGGCCTGGAATGGGTGGCGGTGATTAGCTATGATGGCAGCAACAAATATTATGCGGAT |
| | | AGCGTGAAAGGCCGTTTTACCATTAGCCGTGATAACAGCAAAAACACCCTGAGCCTGCAGat |
| | | gAACAGCCTGCGTGTGGAAGATACCGCGATTTATTATTGCGTGCGTGGCGCGGGCCGTGGCT |
| | | ATACCCGTGGCCCGGATGGCTTTGATATTTGGGGCCAGGGCACCatgGTGACCGTGAGCAGC |
| 1177 | VH Ab17 | GAAGTGCAGCTGCTGGAAAGCGGCGGCGGCGTGGTGCAGCCGGGCCGTAGCCTGCGTCTGAG |
| | | CTGCGCGGCGAGCGGCTTTACCTTTAGCAGCTATGCGatgCATTGGGTGCGTCAGGCGCCGG |
| | | GCAAAGGCCTGGAATGGGTGGCGGTGATTAGCTATGATGGCAGCAACAAATATTATGCGGAT |
| | | AGCGTGAAAGGCCGTTTTACCATTAGCCGTGATAACAGCAAAAACACCCTGAGCCTGCAGat |
| | | gAACAGCCTGCGTGTGGAAGATACCGCGATTTATTATTGCGTGCGTGGCGCGGGCCGTGGCT |
| | | ATACCAACGGCCCGGATGGCTTTGATATTTGGGGCCAGGGCACCatgGTGACCGTGAGCAGC |
| 1178 | VH Ab18 | GAAGTGCAGCTGCTGGAAAGCGGCGGCGGCGTGGTGCAGCCGGGCCGTAGCCTGCGTCTGAG |
| | | CTGCGCGGCGAGCGGCTTTACCTTTAGCAGCTATGCGatgCATTGGGTGCGTCAGGCGCCGG |
| | | GCAAAGGCCTGGAATGGGTGGCGGTGATTAGCTATGATGGCAGCAACAAATATTATGCGGAT |
| | | AGCGTGAAAGGCCGTTTTACCATTAGCCGTGATAACAGCAAAAACACCCTGAGCCTGCAGat |
| | | gAACAGCCTGCGTGTGGAAGATACCGCGATTTATTATTGCGTGCGTGGCGCGGGCCGTGGCT |
| | | TTACCTGGGGCCCGGATGGCTTTGATATTTGGGGCCAGGGCACCatgGTGACCGTGAGCAGC |
| 1179 | VH Ab19 | GAAGTGCAGCTGCTGGAAAGCGGCGGCGGCGTGGTGCAGCCGGGCCGTAGCCTGCGTCTGAG |
| | | CTGCGCGGCGAGCGGCTTTACCTTTAGCAGCTATGCGatgCATTGGGTGCGTCAGGCGCCGG |
| | | GCAAAGGCCTGGAATGGGTGGCGGTGATTAGCTATGATGGCAGCAACAAATATTATGCGGAT |
| | | AGCGTGAAAGGCCGTTTTACCATTAGCCGTGATAACAGCAAAAACACCCTGAGCCTGCAGat |
| | | gAACAGCCTGCGTGTGGAAGATACCGCGATTTATTATTGCGTGCGTGGCGCGGGCCGTGGCT |
| | | TTACCCTGGGCCCGGATGGCTTTGATATTTGGGGCCAGGGCACCatgGTGACCGTGAGCAGC |
| 1180 | VH Ab20 | GAAGTGCAGCTGCTGGAAAGCGGCGGCGGCGTGGTGCAGCCGGGCCGTAGCCTGCGTCTGAG |
| | | CTGCGCGGCGAGCGGCTTTACCTTTAGCAGCTATGCGatgCATTGGGTGCGTCAGGCGCCGG |
| | | GCAAAGGCCTGGAATGGGTGGCGGTGATTAGCTATGATGGCAGCAACAAATATTATGCGGAT |
| | | AGCGTGAAAGGCCGTTTTACCATTAGCCGTGATAACAGCAAAAACACCCTGAGCCTGCAGat |
| | | gAACAGCCTGCGTGTGGAAGATACCGCGATTTATTATTGCGTGCGTGGCGCGGGCCGTGGCC |
| | | TGACCTTTGGCCCGGATGGCTTTGATATTTGGGGCCAGGGCACCatgGTGACCGTGAGCAGC |
| 1181 | VH Ab21 | GAAGTGCAGCTGCTGGAAAGCGGCGGCGGCGTGGTGCAGCCGGGCCGTAGCCTGCGTCTGAG |
| | | CTGCGCGGCGAGCGGCTTTACCTTTAGCAGCTATGCGatgCATTGGGTGCGTCAGGCGCCGG |
| 1190 | VH Ab30 | GAAGTGCAGCTGCTGGAAAGCGGCGGCGGCGTGGTGCAGCCGGGCCGTAGCCTGCGTCTGAG |
| | | CTGCGCGGCGAGCGGCTTTACCTTTAGCAGCTATGCGatgCATTGGGTGCGTCAGGCGCCGG |
| | | GCAAAGGCCTGGAATGGGTGGCGGTGATTAGCTATGATGGCAGCAACAAATATTATGCGGAT |
| | | AGCGTGAAAGGCCGTTTTACCATTAGCCGTGATAACAGCAAAAACACCCTGAGCCTGCAGat |
| | | gAACAGCCTGCGTGTGNNNAAANNNNNNATTTATTATTGCGTGCGTGGCGCGGGCCGTGGCT |
| | | TTACCTGGGGCCCGGATGGCTTTGATATTTGGGGCCAGGGCACCatgGTGACCGTGAGCAGC |
| 1191 | VH Ab31 | GAAGTGCAGCTGCTGGAAAGCGGCGGCGGCGTGGTGCAGCCGGGCCGTAGCCTGCGTCTGAG |
| | | CTGCGCGGCGAGCGGCTTTACCTTTAGCAGCTATGCGatgCATTGGGTGCGTCAGGCGCCGG |
| | | GCAAAGGCCTGGAATGGGTGGCGGTGATTAGCTATGATGGCAGCAACAAATATTATGCGGAT |
| | | AGCGTGAAAGGCCGTTTTACCATTAGCCGTGATAACAGCAAAAACACCCTGAGCCTGCAGat |
| | | gAACAGCCTGCGTGTGGAAGATACCGCGATTTATTATTGCGTGCGTGGCGCGGGCCGTGGCC |
| | | TGACCTATGGCCCGGATGGCTTTGATATTTGGGGCCAGGGCACCatgGTGACCGTGAGCAGC |
| 1192 | VH Ab32 | GAAGTGCAGCTGCTGGAAAGCGGCGGCGGCGTGGTGCAGCCGGGCCGTAGCCTGCGTCTGAG |
| | | CTGCGCGGCGAGCGGCTTTACCTTTAGCAGCTATGCGatgCATTGGGTGCGTCAGGCGCCGG |
| | | GCAAAGGCCTGGAATGGGTGGCGGTGATTAGCTATGATGGCAGCAACAAATATTATGCGGAT |
| | | AGCGTGAAAGGCCGTTTTACCATTAGCCGTGATAACAGCAAAAACACCCTGAGCCTGCAGat |
| | | gAACAGCCTGCGTGTGGAAGATACCGCGATTTATTATTGCGTGCGTGGCGCGGGCCTGGGCT |
| | | TTACCTATGGCCCGGATGGCTTTGATATTTGGGGCCAGGGCACCatgGTGACCGTGAGCAGC |
| 1193 | VH Ab33 | GAAGTGCAGCTGCTGGAAAGCGGCGGCGGCGTGGTGCAGCCGGGCCGTAGCCTGCGTCTGAG |
| | | CTGCGCGGCGAGCGGCTTTACCTTTAGCAGCTATGCGatgCATTGGGTGCGTCAGGCGCCGG |
| | | GCAAAGGCCTGGAATGGGTGGCGGTGATTAGCTATGATGGCAGCAACAAATATTATGCGGAT |
| | | AGCGTGAAAGGCCGTTTTACCATTAGCCGTGATAACAGCAAAAACACCCTGAGCCTGCAGat |
| | | gAACAGCCTGCGTGTGGAAGATACCGCGATTTATTATTGCGTGCGTGGCGCGGGCCAGGGCC |
| | | TGAGCTATGGCCCGGATGGCTTTGATATTTGGGGCCAGGGCACCatgGTGACCGTGAGCAGC |
| 1194 | VH Ab34 | GAAGTGCAGCTGCTGGAAAGCGGCGGCGGCGTGGTGCAGCCGGGCCGTAGCCTGCGTCTGAG |
| | | CTGCGCGGCGAGCGGCTTTACCTTTAGCAGCTATGCGatgCATTGGGTGCGTCAGGCGCCGG |
| | | GCAAAGGCCTGGAATGGGTGGCGGTGATTAGCTATGATGGCAGCAACAAATATTATGCGGAT |
| | | AGCGTGAAAGGCCGTTTTACCATTAGCCGTGATAACAGCAAAAACACCCTGAGCCTGCAGat |
| | | gAACAGCCTGCGTGTGGAAGATACCGCGATTTATTATTGCGTGCGTGGCGCGGGCCGTGGCT |
| | | ATACCCGTGGCCCGGATGGCTTTGATATTTGGGGCCAGGGCACCatgGTGACCGTGAGCAGC |
| 1195 | VH Ab35 | GAAGTGCAGCTGCTGGAAAGCGGCGGCGGCGTGGTGCAGCCGGGCCGTAGCCTGCGTCTGAG |
| | | CTGCGCGGCGAGCGGCTTTACCTTTAGCAGCTATGCGatgCATTGGGTGCGTCAGGCGCCGG |
| | | GCAAAGGCCTGGAATGGGTGGCGGTGATTAGCTATGATGGCAGCAACAAATATTATGCGGAT |
| | | AGCGTGAAAGGCCGTTTTACCATTAGCCGTGATAACAGCAAAAACACCCTGAGCCTGCAGat |
| | | gAACAGCCTGCGTGTGGAAGATACCGCGATTTATTATTGCGTGCGTGGCGCGGGCCGTGGCT |
| | | ATACCAACGGCCCGGATGGCTTTGATATTTGGGGCCAGGGCACCatgGTGACCGTGAGCAGC |
| 1196 | VH Ab36 | GAAGTGCAGCTGCTGGAAAGCGGCGGCGGCGTGGTGCAGCCGGGCCGTAGCCTGCGTCTGAG |
| | | CTGCGCGGCGAGCGGCTTTACCTTTAGCAGCTATGCGatgCATTGGGTGCGTCAGGCGCCGG |
| | | GCAAAGGCCTGGAATGGGTGGCGGTGATTAGCTATGATGGCAGCAACAAATATTATGCGGAT |
| | | AGCGTGAAAGGCCGTTTTACCATTAGCCGTGATAACAGCAAAAACACCCTGAGCCTGCAGat |
| | | gAACAGCCTGCGTGTGGAAGATACCGCGATTTATTATTGCGTGCGTGGCGCGGGCCGTGGCT |
| | | TTACCTATGGCCCGGATGGCTTTGATATTTGGGGCCAGGGCACCatgGTGACCGTGAGCAGC |
| 1197 | VH Ab37 | GAAGTGCAGCTGCTGGAAAGCGGCGGCGGCGTGGTGCAGCCGGGCCGTAGCCTGCGTCTGAG |
| | | CTGCGCGGCGAGCGGCTTTACCTTTAGCAGCTATGCGatgCATTGGGTGCGTCAGGCGCCGG |
| | | GCAAAGGCCTGGAATGGGTGGCGGTGATTAGCTATGATGGCAGCAACAAATATTATGCGGAT |
| | | AGCGTGAAAGGCCGTTTTACCATTAGCCGTGATAACAGCAAAAACACCCTGAGCCTGCAGat |
| | | gAACAGCCTGCGTGTGGAAGATACCGCGATTTATTATTGCGTGCGTGGCGCGGGCCGTGGCC |
| | | TGACCTATGGCCCGGATGGCTTTGATATTTGGGGCCAGGGCACCatgGTGACCGTGAGCAGC |
| 1198 | VH Ab38 | GAAGTGCAGCTGCTGGAAAGCGGCGGCGGCGTGGTGCAGCCGGGCCGTAGCCTGCGTCTGAG |
| | | CTGCGCGGCGAGCGGCTTTACCTTTAGCAGCTATGCGatgCATTGGGTGCGTCAGGCGCCGG |
| | | GCAAAGGCCTGGAATGGGTGGCGGTGATTAGCTATGATGGCAGCAACAAATATTATGCGGAT |
| | | AGCGTGAAAGGCCGTTTTACCATTAGCCGTGATAACAGCAAAAACACCCTGAGCCTGCAGat |
| | | gAACAGCCTGCGTGTGGAAGATACCGCGATTTATTATTGCGTGCGTGGCGCGGGCCAGGGCT |
| | | ATCCGTATGGCCCGGATGGCTTTGATATTTGGGGCCAGGGCACCatgGTGACCGTGAGCAGC |
| 1199 | VH Ab39 | GAAGTGCAGCTGCTGGAAAGCGGCGGCGGCGTGGTGCAGCCGGGCCGTAGCCTGCGTCTGAG |
| | | CTGCGCGGCGAGCGGCTTTACCTTTAGCAGCTATGCGatgCATTGGGTGCGTCAGGCGCCGG |
| | | GCAAAGGCCTGGAATGGGTGGCGGTGATTAGCTATGATGGCAGCAACAAATATTATGCGGAT |
| | | AGCGTGAAAGGCCGTTTTACCATTAGCCGTGATAACAGCAAAAACACCCTGAGCCTGCAGat |
| | | gAACAGCCTGCGTGTGGAAGATACCGCGATTTATTATTGCGTGCGTGGCGCGGGCACCGGCT |
| | | TTACCTATGGCCCGGATGGCTTTGATATTTGGGGCCAGGGCACCatgGTGACCGTGAGCAGC |
| 1200 | VH Ab40 | GAAGTGCAGCTGCTGGAAAGCGGCGGCGGCGTGGTGCAGCCGGGCCGTAGCCTGCGTCTGAG |
| | | CTGCGCGGCGAGCGGCTTTACCTTTAGCAGCTATGCGatgCATTGGGTGCGTCAGGCGCCGG |
| | | GCAAAGGCCTGGAATGGGTGGCGGTGATTAGCTATGATGGCAGCAACAAATATTATGCGGAT |
| | | AGCGTGAAAGGCCGTTTTACCATTAGCCGTGATAACAGCAAAAACACCCTGAGCCTGCAGat |
| | | gAACAGCCTGCGTGTGGAAGATACCGCGATTTATTATTGCGTGCGTGGCGCGGGCatgGGCC |
| | | TGACCTATGGCCCGGATGGCTTTGATATTTGGGGCCAGGGCACCatgGTGACCGTGAGCAGC |
| 1201 | VH Ab41 | GAAGTGCAGCTGCTGGAAAGCGGCGGCGGCGTGGTGCAGCCGGGCCGTAGCCTGCGTCTGAG |
| | | CTGCGCGGCGAGCGGCTTTACCTTTAGCAGCTATGCGatgCATTGGGTGCGTCAGGCGCCGG |
| | | GCAAAGGCCTGGAATGGGTGGCGGTGATTAGCTATGATGGCAGCAACAAATATTATGCGGAT |
| | | AGCGTGAAAGGCCGTTTTACCATTAGCCGTGATAACAGCAAAAACACCCTGAGCCTGCAGat |
| | | gAACAGCCTGCGTGTGGAAGATACCGCGATTTATTATTGCGTGCGTGGCGCGGGCCTGGGCT |
| | | TTCCGTATGGCCCGGATGGCTTTGATATTTGGGGCCAGGGCACCatgGTGACCGTGAGCAGC |
| 1202 | VH Ab42 | GAAGTGCAGCTGCTGGAAAGCGGCGGCGGCGTGGTGCAGCCGGGCCGTAGCCTGCGTCTGAG |
| | | CTGCGCGGCGAGCGGCTTTACCTTTAGCAGCTATGCGatgCATTGGGTGCGTCAGGCGCCGG |
| | | GCAAAGGCCTGGAATGGGTGGCGGTGATTAGCTATGATGGCAGCAACAAATATTATGCGGAT |
| | | AGCGTGAAAGGCCGTTTTACCATTAGCCGTGATAACAGCAAAAACACCCTGAGCCTGCAGat |
| | | gAACAGCCTGCGTGTGGAAGATACCGCGATTTATTATTGCGTGCGTGGCGCGGGCCTGGGCT |
| | | GGGCGTATGGCCCGGATGGCTTTGATATTTGGGGCCAGGGCACCatgGTGACCGTGAGCAGC |
| 1203 | VH Ab43 | GAAGTGCAGCTGCTGGAAAGCGGCGGCGGCGTGGTGCAGCCGGGCCGTAGCCTGCGTCTGAG |
| | | CTGCGCGGCGAGCGGCTTTACCTTTAGCAGCTATGCGatgCATTGGGTGCGTCAGGCGCCGG |
| | | GCAAAGGCCTGGAATGGGTGGCGGTGATTAGCTATGATGGCAGCAACAAATATTATGCGGAT |
| | | AGCGTGAAAGGCCGTTTTACCATTAGCCGTGATAACAGCAAAAACACCCTGAGCCTGCAGat |
| | | gAACAGCCTGCGTGTGGAAGATACCGCGATTTATTATTGCGTGCGTGGCGCGGGCCGTGGCT |
| | | ATCCGTATGGCCCGGATGGCTTTGATATTTGGGGCCAGGGCACCatgGTGACCGTGAGCAGC |
| 1204 | VH Ab44 | GAAGTGCAGCTGCTGGAAAGCGGCGGCGGCGTGGTGCAGCCGGGCCGTAGCCTGCGTCTGAG |
| | | CTGCGCGGCGAGCGGCTTTGATTTTGCGGGCTATGCGatgCATTGGGTGCGTCAGGCGCCGG |
| | | GCAAAGGCCTGGAATGGGTGGCGGTGATTAGCTATGATGGCAGCAACAAATATTATGCGGAT |
| | | AGCGTGAAAGGCCGTTTTACCATTAGCCGTGATAACAGCAAAAACACCCTGAGCCTGCAGat |
| | | gAACAGCCTGCGTGTGGAAGATACCGCGATTTATTATTGCGTGCGTGGCGCGGGCCGTGGCC |
| | | TGACCTATGGCCCGGATGGCTTTGATATTTGGGGCCAGGGCACCatgGTGACCGTGAGCAGC |
| 1205 | VH Ab45 | GAAGTGCAGCTGCTGGAAAGCGGCGGCGGCGTGGTGCAGCCGGGCCGTAGCCTGCGTCTGAG |
| | | CTGCGCGGCGAGCGGCTTTACCTTTAGCAGCTATGCGatgCATTGGGTGCGTCAGGCGCCGG |
| | | GCAAAGGCCTGGAATGGGTGGCGGTGATTAGCTATGATGGCAGCAACAAATATTATGCGGAT |
| | | AGCGTGAAAGGCCGTTTTACCATTAGCCGTGATAACAGCAAAAACACCCTGAGCCTGCAGat |
| | | gAACAGCCTGCGTGTGGAAGATACCGCGATTTATTATTGCGTGCGTGGCGCGGGCCTGGGCC |
| | | TGACCTATGGCCCGGATGGCTTTGATATTTGGGGCCAGGGCACCatgGTGACCGTGAGCAGC |
| 1206 | VH Ab46 | GAAGTGCAGCTGCTGGAAAGCGGCGGCGGCGTGGTGCAGCCGGGCCGTAGCCTGCGTCTGAG |
| | | CTGCGCGGCGAGCGGCTTTACCTTTAGCAGCTATGCGatgCATTGGGTGCGTCAGGCGCCGG |
| | | GCAAAGGCCTGGAATGGGTGGCGGTGATTAGCTATGATGGCAGCAACAAATATTATGCGGAT |
| | | AGCGTGAAAGGCCGTTTTACCATTAGCCGTGATAACAGCAAAAACACCCTGAGCCTGCAGat |
| | | gAACAGCCTGCGTGTGGAAGATACCGCGATTTATTATTGCGTGCGTGGCGCGGGCCTGGGCT |
| | | ATCCGTATGGCCCGGATGGCTTTGATATTTGGGGCCAGGGCACCatgGTGACCGTGAGCAGC |
| 1207 | VH Ab47 | GAAGTGCAGCTGCTGGAAAGCGGCGGCGGCGTGGTGCAGCCGGGCCGTAGCCTGCGTCTGAG |
| | | CTGCGCGGCGAGCGGCTTTACCTTTAGCAGCTATGCGatgCATTGGGTGCGTCAGGCGCCGG |
| | | GCAAAGGCCTGGAATGGGTGGCGGTGATTAGCTATGATGGCAGCAACAAATATTATGCGGAT |
| | | AGCGTGAAAGGCCGTTTTACCATTAGCCGTGATAACAGCAAAAACACCCTGAGCCTGCAGat |
| | | gAACAGCCTGCGTGTGGAAGATACCGCGATTTATTATTGCGTGCGTGGCGCGGGCCGTGGCT |
| | | ATCCGCATGGCCCGGATGGCTTTGATATTTGGGGCCAGGGCACCatgGTGACCGTGAGCAGC |
| 1208 | VH Ab48 | GAAGTGCAGCTGCTGGAAAGCGGCGGCGGCGTGGTGCAGCCGGGCCGTAGCCTGCGTCTGAG |
| | | CTGCGCGGCGAGCGGCTTTACCTTTAGCAGCTATGCGatgCATTGGGTGCGTCAGGCGCCGG |
| | | GCAAAGGCCTGGAATGGGTGGCGGTGATTAGCTATGATGGCAGCAACAAATATTATGCGGAT |
| | | AGCGTGAAAGGCCGTTTTACCATTAGCCGTGATAACAGCAAAAACACCCTGAGCCTGCAGat |
| | | gAACAGCCTGCGTGTGGAAGATACCGCGATTTATTATTGCGTGCGTGGCGCGGGCATTGGCT |
| | | ATCCGCATGGCCCGGATGGCTTTGATATTTGGGGCCAGGGCACCatgGTGACCGTGAGCAGC |
| 1209 | VH Ab49 | GAAGTGCAGCTGCTGGAAAGCGGCGGCGGCGTGGTGCAGCCGGGCCGTAGCCTGCGTCTGAG |
| | | CTGCGCGGCGAGCGGCTTTACCTTTAGCAGCTATGCGatgCATTGGGTGCGTCAGGCGCCGG |
| | | GCAAAGGCCTGGAATGGGTGGCGGTGATTAGCTATGATGGCAGCAACAAATATTATGCGGAT |
| | | AGCGTGAAAGGCCGTTTTACCATTAGCCGTGATAACAGCAAAAACACCCTGAGCCTGCAGat |
| | | gAACAGCCTGCGTGTGGAAGATACCGCGATTTATTATTGCGTGCGTGGCGCGGGCCGTGGCT |
| | | ATCCGTATGGCCCGGATGGCTTTGATATTTGGGGCCAGGGCACCatgGTGACCGTGAGCAGC |
| 1210 | VH Ab50 | GAAGTGCAGCTGCTGGAAAGCGGCGGCGGCGTGGTGCAGCCGGGCCGTAGCCTGCGTCTGAG |
| | | CTGCGCGGCGAGCGGCTTTACCTTTAGCAGCTATGCGatgCATTGGGTGCGTCAGGCGCCGG |
| | | GCAAAGGCCTGGAATGGGTGGCGGTGATTAGCTATGATGGCAGCAACAAATATTATGCGGAT |
| | | AGCGTGAAAGGCCGTTTTACCATTAGCCGTGATAACAGCAAAAACACCCTGAGCCTGCAGat |
| | | gAACAGCCTGCGTGTGGAAGATACCGCGATTTATTATTGCGTGCGTGGCGCGGGCCTGGGCT |
| | | TTCCGTTTGGCCCGGATGGCTTTGATATTTGGGGCCAGGGCACCatgGTGACCGTGAGCAGC |
| 1211 | VH Ab51 | GAAGTGCAGCTGCTGGAAAGCGGCGGCGGCGTGGTGCAGCCGGGCCGTAGCCTGCGTCTGAG |
| | | CTGCGCGGCGAGCGGCTTTACCTTTAGCAGCTATGCGatgCATTGGGTGCGTCAGGCGCCGG |
| | | GCAAAGGCCTGGAATGGGTGGCGGTGATTAGCTATGATGGCAGCAACAAATATTATGCGGAT |
| | | AGCGTGAAAGGCCGTTTTACCATTAGCCGTGATAACAGCAAAAACACCCTGAGCCTGCAGat |
| | | gAACAGCCTGCGTGTGGAAGATACCGCGATTTATTATTGCGTGCGTGGCGCGGGCCGTGGCT |
| | | TTCCGTATGGCCCGGATGGCTTTGATATTTGGGGCCAGGGCACCatgGTGACCGTGAGCAGC |
| 1212 | VH Ab52 | GAAGTGCAGCTGCTGGAAAGCGGCGGCGGCGTGGTGCAGCCGGGCCGTAGCCTGCGTCTGAG |
| | | CTGCGCGGCGAGCGGCTTTACCTTTAGCAGCTATGCGatgCATTGGGTGCGTCAGGCGCCGG |
| | | GCAAAGGCCTGGAATGGGTGGCGGTGATTAGCTATGATGGCAGCAACAAATATTATGCGGAT |
| | | AGCGTGAAAGGCCGTTTTACCATTAGCCGTGATAACAGCAAAAACACCCTGAGCCTGCAGat |
| | | gAACAGCCTGCGTGTGGAAGATACCGCGATTTATTATTGCGTGCGTGGCGCGGGCCTGGGCT |
| | | ATCCGAACGGCCCGGATGGCTTTGATATTTGGGGCCAGGGCACCatgGTGACCGTGAGCAGC |
| 1213 | VH Ab53 | GAAGTGCAGCTGCTGGAAAGCGGCGGCGGCGTGGTGCAGCCGGGCCGTAGCCTGCGTCTGAG |
| | | CTGCGCGGCGAGCGGCTTTACCTTTAGCAGCTATGCGatgCATTGGGTGCGTCAGGCGCCGG |
| | | GCAAAGGCCTGGAATGGGTGGCGGTGATTAGCTATGATGGCAGCAACAAATATTATGCGGAT |
| | | AGCGTGAAAGGCCGTTTTACCATTAGCCGTGATAACAGCAAAAACACCCTGAGCCTGCAGat |
| | | gAACAGCCTGCGTGTGGAAGATACCGCGATTTATTATTGCGTGCGTGGCGCGGGCCAGGGCT |
| | | TTCCGTATGGCCCGGATGGCTTTGATATTTGGGGCCAGGGCACCatgGTGACCGTGAGCAGC |
| 1214 | VH Ab54 | GAAGTGCAGCTGCTGGAAAGCGGCGGCGGCGTGGTGCAGCCGGGCCGTAGCCTGCGTCTGAG |
| | | CTGCGCGGCGAGCGGCTTTACCTTTAGCAGCTATGCGatgCATTGGGTGCGTCAGGCGCCGG |
| | | GCAAAGGCCTGGAATGGGTGGCGGTGATTAGCTATGATGGCAGCAACAAATATTATGCGGAT |
| | | AGCGTGAAAGGCCGTTTTACCATTAGCCGTGATAACAGCAAAAACACCCTGAGCCTGCAGat |
| | | gAACAGCCTGCGTGTGGAAGATACCGCGATTTATTATTGCGTGCGTGGCGCGGGCCAGGGCT |
| | | ATCCGTATGGCCCGGATGGCTTTGATATTTGGGGCCAGGGCACCatgGTGACCGTGAGCAGC |
| 1215 | VH Ab55 | GAAGTGCAGCTGCTGGAAAGCGGCGGCGGCGTGGTGCAGCCGGGCCGTAGCCTGCGTCTGAG |
| | | CTGCGCGGCGAGCGGCTTTACCTTTAGCAGCTATGCGatgCATTGGGTGCGTCAGGCGCCGG |
| | | GCAAAGGCCTGGAATGGGTGGCGGTGATTAGCTATGATGGCAGCAACAAATATTATGCGGAT |
| | | AGCGTGAAAGGCCGTTTTACCATTAGCCGTGATAACAGCAAAAACACCCTGAGCCTGCAGat |
| | | gAACAGCCTGCGTGTGGAAGATACCGCGATTTATTATTGCGTGCGTGGCGCGGGCACCGGCT |
| | | TTACCTATGGCCCGGATGGCTTTGATATTTGGGGCCAGGGCACCatgGTGACCGTGAGCAGC |
| 1216 | VH Ab56 | GAAGTGCAGCTGCTGGAAAGCGGCGGCGGCGTGGTGCAGCCGGGCCGTAGCCTGCGTCTGAG |
| | | CTGCGCGGCGAGCGGCTTTACCTTTAGCAGCTATGCGatgCATTGGGTGCGTCAGGCGCCGG |
| | | GCAAAGGCCTGGAATGGGTGGCGGTGATTAGCTATGATGGCAGCAACAAATATTATGCGGAT |
| | | AGCGTGAAAGGCCGTTTTACCATTAGCCGTGATAACAGCAAAAACACCCTGAGCCTGCAGat |
| | | gAACAGCCTGCGTGTGGAAGATACCGCGATTTATTATTGCGTGCGTGGCGCGGGCatgGGCC |
| | | TGACCTATGGCCCGGATGGCTTTGATATTTGGGGCCAGGGCACCatgGTGACCGTGAGCAGC |
| 1217 | VH Ab57 | GAAGTGCAGCTGCTGGAAAGCGGCGGCGGCGTGGTGCAGCCGGGCCGTAGCCTGCGTCTGAG |
| | | CTGCGCGGCGAGCGGCTTTACCTTTAGCAGCTATGCGatgCATTGGGTGCGTCAGGCGCCGG |
| | | GCAAAGGCCTGGAATGGGTGGCGGTGATTAGCTATGATGGCAGCAACAAATATTATGCGGAT |
| | | AGCGTGAAAGGCCGTTTTACCATTAGCCGTGATAACAGCAAAAACACCCTGAGCCTGCAGat |
| | | gAACAGCCTGCGTGTGGAAGATACCGCGATTTATTATTGCGTGCGTGGCGCGGGCCTGGGCT |
| | | TTCCGTATGGCCCGGATGGCTTTGATATTTGGGGCCAGGGCACCatgGTGACCGTGAGCAGC |
| 1218 | VH Ab58 | GAAGTGCAGCTGCTGGAAAGCGGCGGCGGCGTGGTGCAGCCGGGCCGTAGCCTGCGTCTGAG |
| | | CTGCGCGGCGAGCGGCTTTACCTTTAGCAGCTATGCGatgCATTGGGTGCGTCAGGCGCCGG |
| | | GCAAAGGCCTGGAATGGGTGGCGGTGATTAGCTATGATGGCAGCAACAAATATTATGCGGAT |
| | | AGCGTGAAAGGCCGTTTTACCATTAGCCGTGATAACAGCAAAAACACCCTGAGCCTGCAGat |
| | | gAACAGCCTGCGTGTGGAAGATACCGCGATTTATTATTGCGTGCGTGGCGCGGGCCTGGGCT |
| | | GGGCGTATGGCCCGGATGGCTTTGATATTTGGGGCCAGGGCACCatgGTGACCGTGAGCAGC |
| 1219 | VH Ab59 | GAAGTGCAGCTGCTGGAAAGCGGCGGCGGCGTGGTGCAGCCGGGCCGTAGCCTGCGTCTGAG |
| | | CTGCGCGGCGAGCGGCTTTACCTTTAGCAGCTATGCGatgCATTGGGTGCGTCAGGCGCCGG |
| | | GCAAAGGCCTGGAATGGGTGGCGGTGATTAGCTATGATGGCAGCAACAAATATTATGCGGAT |
| | | AGCGTGAAAGGCCGTTTTACCATTAGCCGTGATAACAGCAAAAACACCCTGAGCCTGCAGat |
| | | gAACAGCCTGCGTGTGGAAGATACCGCGATTTATTATTGCGTGCGTGGCGCGGGCCGTGGCT |
| | | ATCCGTATGGCCCGGATGGCTTTGATATTTGGGGCCAGGGCACCatgGTGACCGTGAGCAGC |
| 1220 | VH Ab60 | GAAGTGCAGCTGCTGGAAAGCGGCGGCGGCGTGGTGCAGCCGGGCCGTAGCCTGCGTCTGAG |
| | | CTGCGCGGCGAGCGGCTTTGATTTTGCGGGCTATGCGatgCATTGGGTGCGTCAGGCGCCGG |
| | | GCAAAGGCCTGGAATGGGTGGCGGTGATTAGCTATGATGGCAGCAACAAATATTATGCGGAT |
| | | AGCGTGAAAGGCCGTTTTACCATTAGCCGTGATAACAGCAAAAACACCCTGAGCCTGCAGat |
| | | gAACAGCCTGCGTGTGGAAGATACCGCGATTTATTATTGCGTGCGTGGCGCGGGCCGTGGCC |
| | | TGACCTATGGCCCGGATGGCTTTGATATTTGGGGCCAGGGCACCatgGTGACCGTGAGCAGC |
| 1221 | VH Ab61 | GAAGTGCAGCTGCTGGAAAGCGGCGGCGGCGTGGTGCAGCCGGGCCGTAGCCTGCGTCTGAG |
| | | CTGCGCGGCGAGCGGCTTTACCTTTAGCAGCTATGCGatgCATTGGGTGCGTCAGGCGCCGG |
| | | GCAAAGGCCTGGAATGGGTGGCGGTGATTAGCTATGATGGCAGCAACAAATATTATGCGGAT |
| | | AGCGTGAAAGGCCGTTTTACCATTAGCCGTGATAACAGCAAAAACACCCTGAGCCTGCAGat |
| | | gAACAGCCTGCGTGTGGAAGATACCGCGATTTATTATTGCGTGCGTGGCGCGGGCCTGGGCC |
| | | TGACCTATGGCCCGGATGGCTTTGATATTTGGGGCCAGGGCACCatgGTGACCGTGAGCAGC |
| 1222 | VH Ab62 | GAAGTGCAGCTGCTGGAAAGCGGCGGCGGCGTGGTGCAGCCGGGCCGTAGCCTGCGTCTGAG |
| | | CTGCGCGGCGAGCGGCTTTACCTTTAGCAGCTATGCGatgCATTGGGTGCGTCAGGCGCCGG |
| | | GCAAAGGCCTGGAATGGGTGGCGGTGATTAGCTATGATGGCAGCAACAAATATTATGCGGAT |
| | | AGCGTGAAAGGCCGTTTTACCATTAGCCGTGATAACAGCAAAAACACCCTGAGCCTGCAGat |
| | | gAACAGCCTGCGTGTGGAAGATACCGCGATTTATTATTGCGTGCGTGGCGCGGGCCTGGGCT |
| | | ATCCGTATGGCCCGGATGGCTTTGATATTTGGGGCCAGGGCACCatgGTGACCGTGAGCAGC |
| 1223 | VH Ab63 | GAAGTGCAGCTGCTGGAAAGCGGCGGCGGCGTGGTGCAGCCGGGCCGTAGCCTGCGTCTGAG |
| | | CTGCGCGGCGAGCGGCTTTACCTTTAGCAGCTATGCGatgCATTGGGTGCGTCAGGCGCCGG |
| | | GCAAAGGCCTGGAATGGGTGGCGGTGATTAGCTATGATGGCAGCAACAAATATTATGCGGAT |
| | | AGCGTGAAAGGCCGTTTTACCATTAGCCGTGATAACAGCAAAAACACCCTGAGCCTGCAGat |
| | | gAACAGCCTGCGTGTGGAAGATACCGCGATTTATTATTGCGTGCGTGGCGCGGGCCGTGGCT |
| | | ATCCGCATGGCCCGGATGGCTTTGATATTTGGGGCCAGGGCACCatgGTGACCGTGAGCAGC |
| 1224 | VH Ab64 | GAAGTGCAGCTGCTGGAAAGCGGCGGCGGCGTGGTGCAGCCGGGCCGTAGCCTGCGTCTGAG |
| | | CTGCGCGGCGAGCGGCTTTACCTTTAGCAGCTATGCGatgCATTGGGTGCGTCAGGCGCCGG |
| | | GCAAAGGCCTGGAATGGGTGGCGGTGATTAGCTATGATGGCAGCAACAAATATTATGCGGAT |
| | | AGCGTGAAAGGCCGTTTTACCATTAGCCGTGATAACAGCAAAAACACCCTGAGCCTGCAGat |
| | | gAACAGCCTGCGTGTGGAAGATACCGCGATTTATTATTGCGTGCGTGGCGCGGGCATTGGCT |
| | | ATCCGCATGGCCCGGATGGCTTTGATATTTGGGGCCAGGGCACCatgGTGACCGTGAGCAGC |
| 1225 | VH Ab65 | GAAGTGCAGCTGCTGGAAAGCGGCGGCGGCGTGGTGCAGCCGGGCCGTAGCCTGCGTCTGAG |
| | | CTGCGCGGCGAGCGGCTTTACCTTTAGCAGCTATGCGatgCATTGGGTGCGTCAGGCGCCGG |
| | | GCAAAGGCCTGGAATGGGTGGCGGTGATTAGCTATGATGGCAGCAACAAATATTATGCGGAT |
| | | AGCGTGAAAGGCCGTTTTACCATTAGCCGTGATAACAGCAAAAACACCCTGAGCCTGCAGat |
| | | gAACAGCCTGCGTGTGGAAGATACCGCGATTTATTATTGCGTGCGTGGCGCGGGCCGTGGCT |
| | | ATCCGTATGGCCCGGATGGCTTTGATATTTGGGGCCAGGGCACCatgGTGACCGTGAGCAGC |
| 1226 | VH Ab66 | GAAGTGCAGCTGCTGGAAAGCGGCGGCGGCGTGGTGCAGCCGGGCCGTAGCCTGCGTCTGAG |
| | | CTGCGCGGCGAGCGGCTTTACCTTTAGCAGCTATGCGatgCATTGGGTGCGTCAGGCGCCGG |
| | | GCAAAGGCCTGGAATGGGTGGCGGTGATTAGCTATGATGGCAGCAACAAATATTATGCGGAT |
| | | AGCGTGAAAGGCCGTTTTACCATTAGCCGTGATAACAGCAAAAACACCCTGAGCCTGCAGat |
| | | gAACAGCCTGCGTGTGGAAGATACCGCGATTTATTATTGCGTGCGTGGCGCGGGCCTGGGCT |
| | | TTCCGTTTGGCCCGGATGGCTTTGATATTTGGGGCCAGGGCACCatgGTGACCGTGAGCAGC |
| 1227 | VH Ab67 | GAAGTGCAGCTGCTGGAAAGCGGCGGCGGCGTGGTGCAGCCGGGCCGTAGCCTGCGTCTGAG |
| | | CTGCGCGGCGAGCGGCTTTACCTTTAGCAGCTATGCGatgCATTGGGTGCGTCAGGCGCCGG |
| | | GCAAAGGCCTGGAATGGGTGGCGGTGATTAGCTATGATGGCAGCAACAAATATTATGCGGAT |
| | | AGCGTGAAAGGCCGTTTTACCATTAGCCGTGATAACAGCAAAAACACCCTGAGCCTGCAGat |
| | | gAACAGCCTGCGTGTGGAAGATACCGCGATTTATTATTGCGTGCGTGGCGCGGGCCGTGGCT |
| | | TTCCGTATGGCCCGGATGGCTTTGATATTTGGGGCCAGGGCACCatgGTGACCGTGAGCAGC |
| 1228 | VH Ab68 | GAAGTGCAGCTGCTGGAAAGCGGCGGCGGCGTGGTGCAGCCGGGCCGTAGCCTGCGTCTGAG |
| | | CTGCGCGGCGAGCGGCTTTACCTTTAGCAGCTATGCGatgCATTGGGTGCGTCAGGCGCCGG |
| | | GCAAAGGCCTGGAATGGGTGGCGGTGATTAGCTATGATGGCAGCAACAAATATTATGCGGAT |
| | | AGCGTGAAAGGCCGTTTTACCATTAGCCGTGATAACAGCAAAAACACCCTGAGCCTGCAGat |
| | | gAACAGCCTGCGTGTGGAAGATACCGCGATTTATTATTGCGTGCGTGGCGCGGGCCTGGGCT |
| | | ATCCGAACGGCCCGGATGGCTTTGATATTTGGGGCCAGGGCACCatgGTGACCGTGAGCAGC |
| 1229 | VH Ab69 | GAAGTGCAGCTGCTGGAAAGCGGCGGCGGCGTGGTGCAGCCGGGCCGTAGCCTGCGTCTGAG |
| | | CTGCGCGGCGAGCGGCTTTACCTTTAGCAGCTATGCGatgCATTGGGTGCGTCAGGCGCCGG |
| | | GCAAAGGCCTGGAATGGGTGGCGGTGATTAGCTATGATGGCAGCAACAAATATTATGCGGAT |
| | | AGCGTGAAAGGCCGTTTTACCATTAGCCGTGATAACAGCAAAAACACCCTGAGCCTGCAGat |
| | | gAACAGCCTGCGTGTGGAAGATACCGCGATTTATTATTGCGTGCGTGGCGCGGGCCAGGGCT |
| | | TTCCGTATGGCCCGGATGGCTTTGATATTTGGGGCCAGGGCACCatgGTGACCGTGAGCAGC |
| 1230 | VH Ab70 | GAAGTGCAGCTGCTGGAAAGCGGCGGCGGCGTGGTGCAGCCGGGCCGTAGCCTGCGTCTGAG |
| | | CTGCGCGGCGAGCGGCTTTACCTTTAGCAGCTATGCGatgCATTGGGTGCGTCAGGCGCCGG |
| | | GCAAAGGCCTGGAATGGGTGGCGGTGATTAGCTATGATGGCAGCAACAAATATTATGCGGAT |
| | | AGCGTGAAAGGCCGTTTTACCATTAGCCGTGATAACAGCAAAAACACCCTGAGCCTGCAGat |
| | | gAACAGCCTGCGTGTGGAAGATACCGCGATTTATTATTGCGTGCGTGGCGCGGGCCAGGGCT |
| | | ATCCGTATGGCCCGGATGGCTTTGATATTTGGGGCCAGGGCACCatgGTGACCGTGAGCAGC |
| 1231 | VH Ab71 | GAAGTGCAGCTGCTGGAAAGCGGCGGCGGCGTGGTGCAGCCGGGCCGTAGCCTGCGTCTGAG |
| | | CTGCGCGGCGAGCGGCTTTACCTTTAGCAGCTATGCGatgCATTGGGTGCGTCAGGCGCCGG |
| | | GCAAAGGCCTGGAATGGGTGGCGGTGATTAGCTATGATGGCAGCAACAAATATTATGCGGAT |
| | | AGCGTGAAAGGCCGTTTTACCATTAGCCGTGATAACAGCAAAAACACCCTGAGCCTGCAGat |
| | | gAACAGCCTGCGTGTGGAAGATACCGCGATTTATTATTGCGTGCGTGGCGCGGGCACCGGCT |
| | | TTACCTATGGCCCGGATGGCTTTGATATTTGGGGCCAGGGCACCatgGTGACCGTGAGCAGC |
| 1232 | VH Ab72 | GAAGTGCAGCTGCTGGAAAGCGGCGGCGGCGTGGTGCAGCCGGGCCGTAGCCTGCGTCTGAG |
| | | CTGCGCGGCGAGCGGCTTTACCTTTAGCAGCTATGCGatgCATTGGGTGCGTCAGGCGCCGG |
| | | GCAAAGGCCTGGAATGGGTGGCGGTGATTAGCTATGATGGCAGCAACAAATATTATGCGGAT |
| | | AGCGTGAAAGGCCGTTTTACCATTAGCCGTGATAACAGCAAAAACACCCTGAGCCTGCAGat |
| | | gAACAGCCTGCGTGTGGAAGATACCGCGATTTATTATTGCGTGCGTGGCGCGGGCatgGGCC |
| | | TGACCTATGGCCCGGATGGCTTTGATATTTGGGGCCAGGGCACCatgGTGACCGTGAGCAGC |
| 1233 | VH Ab73 | GAAGTGCAGCTGCTGGAAAGCGGCGGCGGCGTGGTGCAGCCGGGCCGTAGCCTGCGTCTGAG |
| | | CTGCGCGGCGAGCGGCTTTACCTTTAGCAGCTATGCGatgCATTGGGTGCGTCAGGCGCCGG |
| | | GCAAAGGCCTGGAATGGGTGGCGGTGATTAGCTATGATGGCAGCAACAAATATTATGCGGAT |
| | | AGCGTGAAAGGCCGTTTTACCATTAGCCGTGATAACAGCAAAAACACCCTGAGCCTGCAGat |
| | | gAACAGCCTGCGTGTGGAAGATACCGCGATTTATTATTGCGTGCGTGGCGCGGGCCTGGGCT |
| | | TTCCGTATGGCCCGGATGGCTTTGATATTTGGGGCCAGGGCACCatgGTGACCGTGAGCAGC |
| 1234 | VH Ab74 | GAAGTGCAGCTGCTGGAAAGCGGCGGCGGCGTGGTGCAGCCGGGCCGTAGCCTGCGTCTGAG |
| | | CTGCGCGGCGAGCGGCTTTACCTTTAGCAGCTATGCGatgCATTGGGTGCGTCAGGCGCCGG |
| | | GCAAAGGCCTGGAATGGGTGGCGGTGATTAGCTATGATGGCAGCAACAAATATTATGCGGAT |
| | | AGCGTGAAAGGCCGTTTTACCATTAGCCGTGATAACAGCAAAAACACCCTGAGCCTGCAGat |
| | | gAACAGCCTGCGTGTGGAAGATACCGCGATTTATTATTGCGTGCGTGGCGCGGGCCTGGGCT |
| | | GGGCGTATGGCCCGGATGGCTTTGATATTTGGGGCCAGGGCACCatgGTGACCGTGAGCAGC |
| 1235 | VH Ab75 | GAAGTGCAGCTGCTGGAAAGCGGCGGCGGCGTGGTGCAGCCGGGCCGTAGCCTGCGTCTGAG |
| | | CTGCGCGGCGAGCGGCTTTACCTTTAGCAGCTATGCGatgCATTGGGTGCGTCAGGCGCCGG |
| | | GCAAAGGCCTGGAATGGGTGGCGGTGATTAGCTATGATGGCAGCAACAAATATTATGCGGAT |
| | | AGCGTGAAAGGCCGTTTTACCATTAGCCGTGATAACAGCAAAAACACCCTGAGCCTGCAGat |
| | | gAACAGCCTGCGTGTGGAAGATACCGCGATTTATTATTGCGTGCGTGGCGCGGGCCGTGGCT |
| | | ATCCGTATGGCCCGGATGGCTTTGATATTTGGGGCCAGGGCACCatgGTGACCGTGAGCAGC |
| 1236 | VH Ab76 | GAAGTGCAGCTGCTGGAAAGCGGCGGCGGCGTGGTGCAGCCGGGCCGTAGCCTGCGTCTGAG |
| | | CTGCGCGGCGAGCGGCTTTGATTTTGCGGGCTATGCGatgCATTGGGTGCGTCAGGCGCCGG |
| | | GCAAAGGCCTGGAATGGGTGGCGGTGATTAGCTATGATGGCAGCAACAAATATTATGCGGAT |
| | | AGCGTGAAAGGCCGTTTTACCATTAGCCGTGATAACAGCAAAAACACCCTGAGCCTGCAGat |
| | | gAACAGCCTGCGTGTGGAAGATACCGCGATTTATTATTGCGTGCGTGGCGCGGGCCGTGGCC |
| | | TGACCTATGGCCCGGATGGCTTTGATATTTGGGGCCAGGGCACCatgGTGACCGTGAGCAGC |
| 1237 | VH Ab77 | GAAGTGCAGCTGCTGGAAAGCGGCGGCGGCGTGGTGCAGCCGGGCCGTAGCCTGCGTCTGAG |
| | | CTGCGCGGCGAGCGGCTTTACCTTTAGCAGCTATGCGatgCATTGGGTGCGTCAGGCGCCGG |
| | | GCAAAGGCCTGGAATGGGTGGCGGTGATTAGCTATGATGGCAGCAACAAATATTATGCGGAT |
| | | AGCGTGAAAGGCCGTTTTACCATTAGCCGTGATAACAGCAAAAACACCCTGAGCCTGCAGat |
| | | gAACAGCCTGCGTGTGGAAGATACCGCGATTTATTATTGCGTGCGTGGCGCGGGCCTGGGCC |
| | | TGACCTATGGCCCGGATGGCTTTGATATTTGGGGCCAGGGCACCatgGTGACCGTGAGCAGC |
| 1238 | VH Ab78 | GAAGTGCAGCTGCTGGAAAGCGGCGGCGGCGTGGTGCAGCCGGGCCGTAGCCTGCGTCTGAG |
| | | CTGCGCGGCGAGCGGCTTTACCTTTAGCAGCTATGCGatgCATTGGGTGCGTCAGGCGCCGG |
| | | GCAAAGGCCTGGAATGGGTGGCGGTGATTAGCTATGATGGCAGCAACAAATATTATGCGGAT |
| | | AGCGTGAAAGGCCGTTTTACCATTAGCCGTGATAACAGCAAAAACACCCTGAGCCTGCAGat |
| | | gAACAGCCTGCGTGTGGAAGATACCGCGATTTATTATTGCGTGCGTGGCGCGGGCCTGGGCT |
| | | ATCCGTATGGCCCGGATGGCTTTGATATTTGGGGCCAGGGCACCatgGTGACCGTGAGCAGC |
| 1239 | VH Ab79 | GAAGTGCAGCTGCTGGAAAGCGGCGGCGGCGTGGTGCAGCCGGGCCGTAGCCTGCGTCTGAG |
| | | CTGCGCGGCGAGCGGCTTTACCTTTAGCAGCTATGCGatgCATTGGGTGCGTCAGGCGCCGG |
| | | GCAAAGGCCTGGAATGGGTGGCGGTGATTAGCTATGATGGCAGCAACAAATATTATGCGGAT |
| | | AGCGTGAAAGGCCGTTTTACCATTAGCCGTGATAACAGCAAAAACACCCTGAGCCTGCAGat |
| | | gAACAGCCTGCGTGTGGAAGATACCGCGATTTATTATTGCGTGCGTGGCGCGGGCCGTGGCT |
| | | ATCCGCATGGCCCGGATGGCTTTGATATTTGGGGCCAGGGCACCatgGTGACCGTGAGCAGC |
| 1240 | VH Ab80 | GAAGTGCAGCTGCTGGAAAGCGGCGGCGGCGTGGTGCAGCCGGGCCGTAGCCTGCGTCTGAG |
| | | CTGCGCGGCGAGCGGCTTTACCTTTAGCAGCTATGCGatgCATTGGGTGCGTCAGGCGCCGG |
| | | GCAAAGGCCTGGAATGGGTGGCGGTGATTAGCTATGATGGCAGCAACAAATATTATGCGGAT |
| | | AGCGTGAAAGGCCGTTTTACCATTAGCCGTGATAACAGCAAAAACACCCTGAGCCTGCAGat |
| | | gAACAGCCTGCGTGTGGAAGATACCGCGATTTATTATTGCGTGCGTGGCGCGGGCATTGGCT |
| | | ATCCGCATGGCCCGGATGGCTTTGATATTTGGGGCCAGGGCACCatgGTGACCGTGAGCAGC |
| 1241 | VH Ab81 | GAAGTGCAGCTGCTGGAAAGCGGCGGCGGCGTGGTGCAGCCGGGCCGTAGCCTGCGTCTGAG |
| | | CTGCGCGGCGAGCGGCTTTACCTTTAGCAGCTATGCGatgCATTGGGTGCGTCAGGCGCCGG |
| | | GCAAAGGCCTGGAATGGGTGGCGGTGATTAGCTATGATGGCAGCAACAAATATTATGCGGAT |
| | | AGCGTGAAAGGCCGTTTTACCATTAGCCGTGATAACAGCAAAAACACCCTGAGCCTGCAGat |
| | | gAACAGCCTGCGTGTGGAAGATACCGCGATTTATTATTGCGTGCGTGGCGCGGGCCGTGGCT |
| | | ATCCGTATGGCCCGGATGGCTTTGATATTTGGGGCCAGGGCACCatgGTGACCGTGAGCAGC |
| 1242 | VH Ab82 | GAAGTGCAGCTGCTGGAAAGCGGCGGCGGCGTGGTGCAGCCGGGCCGTAGCCTGCGTCTGAG |
| | | CTGCGCGGCGAGCGGCTTTACCTTTAGCAGCTATGCGatgCATTGGGTGCGTCAGGCGCCGG |
| | | GCAAAGGCCTGGAATGGGTGGCGGTGATTAGCTATGATGGCAGCAACAAATATTATGCGGAT |
| | | AGCGTGAAAGGCCGTTTTACCATTAGCCGTGATAACAGCAAAAACACCCTGAGCCTGCAGat |
| | | gAACAGCCTGCGTGTGGAAGATACCGCGATTTATTATTGCGTGCGTGGCGCGGGCCTGGGCT |
| | | TTCCGTTTGGCCCGGATGGCTTTGATATTTGGGGCCAGGGCACCatgGTGACCGTGAGCAGC |
| 1243 | VH Ab83 | GAAGTGCAGCTGCTGGAAAGCGGCGGCGGCGTGGTGCAGCCGGGCCGTAGCCTGCGTCTGAG |
| | | CTGCGCGGCGAGCGGCTTTACCTTTAGCAGCTATGCGatgCATTGGGTGCGTCAGGCGCCGG |
| | | GCAAAGGCCTGGAATGGGTGGCGGTGATTAGCTATGATGGCAGCAACAAATATTATGCGGAT |
| | | AGCGTGAAAGGCCGTTTTACCATTAGCCGTGATAACAGCAAAAACACCCTGAGCCTGCAGat |
| | | gAACAGCCTGCGTGTGGAAGATACCGCGATTTATTATTGCGTGCGTGGCGCGGGCCGTGGCT |
| | | TTCCGTATGGCCCGGATGGCTTTGATATTTGGGGCCAGGGCACCatgGTGACCGTGAGCAGC |
| 1244 | VH Ab84 | GAAGTGCAGCTGCTGGAAAGCGGCGGCGGCGTGGTGCAGCCGGGCCGTAGCCTGCGTCTGAG |
| | | CTGCGCGGCGAGCGGCTTTACCTTTAGCAGCTATGCGatgCATTGGGTGCGTCAGGCGCCGG |
| | | GCAAAGGCCTGGAATGGGTGGCGGTGATTAGCTATGATGGCAGCAACAAATATTATGCGGAT |
| | | AGCGTGAAAGGCCGTTTTACCATTAGCCGTGATAACAGCAAAAACACCCTGAGCCTGCAGat |
| | | gAACAGCCTGCGTGTGGAAGATACCGCGATTTATTATTGCGTGCGTGGCGCGGGCCTGGGCT |
| | | ATCCGAACGGCCCGGATGGCTTTGATATTTGGGGCCAGGGCACCatgGTGACCGTGAGCAGC |
| 1245 | VH Ab85 | GAAGTGCAGCTGCTGGAAAGCGGCGGCGGCGTGGTGCAGCCGGGCCGTAGCCTGCGTCTGAG |
| | | CTGCGCGGCGAGCGGCTTTACCTTTAGCAGCTATGCGatgCATTGGGTGCGTCAGGCGCCGG |
| | | GCAAAGGCCTGGAATGGGTGGCGGTGATTAGCTATGATGGCAGCAACAAATATTATGCGGAT |
| | | AGCGTGAAAGGCCGTTTTACCATTAGCCGTGATAACAGCAAAAACACCCTGAGCCTGCAGat |
| | | gAACAGCCTGCGTGTGGAAGATACCGCGATTTATTATTGCGTGCGTGGCGCGGGCCAGGGCT |
| | | TTCCGTATGGCCCGGATGGCTTTGATATTTGGGGCCAGGGCACCatgGTGACCGTGAGCAGC |
| 1246 | VH Ab86 | GAAGTGCAGCTGCTGGAAAGCGGCGGCGGCGTGGTGCAGCCGGGCCGTAGCCTGCGTCTGAG |
| | | CTGCGCGGCGAGCGGCTTTACCTTTAGCAGCTATGCGatgCATTGGGTGCGTCAGGCGCCGG |
| | | GCAAAGGCCTGGAATGGGTGGCGGTGATTAGCTATGATGGCAGCAACAAATATTATGCGGAT |
| | | AGCGTGAAAGGCCGTTTTACCATTAGCCGTGATAACAGCAAAAACACCCTGAGCCTGCAGat |
| | | gAACAGCCTGCGTGTGGAAGATACCGCGATTTATTATTGCGTGCGTGGCGCGGGCCGTGGCC |
| | | TGACCTATGGCCCGGATGGCTTTGATATTTGGGGCCAGGGCACCatgGTGACCGTGAGCAGC |
| 1247 | VH Ab87 | GAAGTGCAGCTGCTGGAAAGCGGCGGCGGCGTGGTGCAGCCGGGCCGTAGCCTGCGTCTGAG |
| | | CTGCGCGGCGAGCGGCTTTACCTTTAGCAGCTATGCGatgCATTGGGTGCGTCAGGCGCCGG |
| | | GCAAAGGCCTGGAATGGGTGGCGGTGATTAGCTATGATGGCAGCAACAAATATTATGCGGAT |
| | | AGCGTGAAAGGCCGTTTTACCATTAGCCGTGATAACAGCAAAAACACCCTGAGCCTGCAGat |
| | | gAACAGCCTGCGTGTGGAAGATACCGCGATTTATTATTGCGTGCGTGGCGCGGGCCGTGGCT |
| | | TTACCTGGGGCCCGGATGGCTTTGATATTTGGGGCCAGGGCACCatgGTGACCGTGAGCAGC |
| 1248 | VH Ab88 | GAAGTGCAGCTGCTGGAAAGCGGCGGCGGCGTGGTGCAGCCGGGCCGTAGCCTGCGTCTGAG |
| | | CTGCGCGGCGAGCGGCTTTACCTTTAGCAGCTATGCGatgCATTGGGTGCGTCAGGCGCCGG |
| | | GCAAAGGCCTGGAATGGGTGGCGGTGATTAGCTATGATGGCAGCAACAAATATTATGCGGAT |
| | | AGCGTGAAAGGCCGTTTTACCATTAGCCGTGATAACAGCAAAAACACCCTGAGCCTGCAGat |
| | | gAACAGCCTGCGTGTGGAAGATACCGCGATTTATTATTGCGTGCGTGGCGCGGGCCGTGGCC |
| | | TGACCTATGGCCCGGATGGCTTTGATATTTGGGGCCAGGGCACCatgGTGACCGTGAGCAGC |
| 1249 | VH Ab89 | GAAGTGCAGCTGCTGGAAAGCGGCGGCGGCGTGGTGCAGCCGGGCCGTAGCCTGCGTCTGAG |
| | | CTGCGCGGCGAGCGGCTTTACCTTTAGCAGCTATGCGatgCATTGGGTGCGTCAGGCGCCGG |
| | | GCAAAGGCCTGGAATGGGTGGCGGTGATTAGCTATGATGGCAGCAACAAATATTATGCGGAT |
| | | AGCGTGAAAGGCCGTTTTACCATTAGCCGTGATAACAGCAAAAACACCCTGAGCCTGCAGat |
| | | gAACAGCCTGCGTGTGGAAGATACCGCGATTTATTATTGCGTGCGTGGCGCGGGCCGTGGCT |
| | | TTCCGTATGGCCCGGATGGCTTTGATATTTGGGGCCAGGGCACCatgGTGACCGTGAGCAGC |
| 1250 | VH Ab90 | GAAGTGCAGCTGCTGGAAAGCGGCGGCGGCGTGGTGCAGCCGGGCCGTAGCCTGCGTCTGAG |
| | | CTGCGCGGCGAGCGGCTTTACCTTTAGCAGCTATGCGatgCATTGGGTGCGTCAGGCGCCGG |
| | | GCAAAGGCCTGGAATGGGTGGCGGTGATTAGCTATGATGGCAGCAACAAATATTATGCGGAT |
| | | AGCGTGAAAGGCCGTTTTACCATTAGCCGTGATAACAGCAAAAACACCCTGAGCCTGCAGat |
| | | gAACAGCCTGCGTGTGGAAGATACCGCGATTTATTATTGCGTGCGTGGCGCGGGCCGTGGCT |
| | | ATCCGTATGGCCCGGATGGCTTTGATATTTGGGGCCAGGGCACCatgGTGACCGTGAGCAGC |
| 1251 | VH Ab91 | GAAGTGCAGCTGCTGGAAAGCGGCGGCGGCGTGGTGCAGCCGGGCCGTAGCCTGCGTCTGAG |
| | | CTGCGCGGCGAGCGGCTTTACCTTTAGCAGCTATGCGatgCATTGGGTGCGTCAGGCGCCGG |
| | | GCAAAGGCCTGGAATGGGTGGCGGTGATTAGCTATGATGGCAGCAACAAATATTATGCGGAT |
| | | AGCGTGAAAGGCCGTTTTACCATTAGCCGTGATAACAGCAAAAACACCCTGAGCCTGCAGat |
| | | gAACAGCCTGCGTGTGGAAGATACCGCGATTTATTATTGCGTGCGTGGCGCGGGCCAGGGCT |
| | | ATatgCATGGCCCGGATGGCTTTGATATTTGGGGCCAGGGCACCatgGTGACCGTGAGCAGC |
| 1252 | VH Ab92 | GAAGTGCAGCTGCTGGAAAGCGGCGGCGGCGTGGTGCAGCCGGGCCGTAGCCTGCGTCTGAG |
| | | CTGCGCGGCGAGCGGCTTTACCTTTAGCAGCTATGCGatgCATTGGGTGCGTCAGGCGCCGG |
| | | GCAAAGGCCTGGAATGGGTGGCGGTGATTAGCTATGATGGCAGCAACAAATATTATGCGGAT |
| | | AGCGTGAAAGGCCGTTTTACCATTAGCCGTGATAACAGCAAAAACACCCTGAGCCTGCAGat |
| | | gAACAGCCTGCGTGTGGAAGATACCGCGATTTATTATTGCGTGCGTGGCGCGGGCCATGGCT |
| | | TTCCGACCGGCCCGGATGGCTTTGATATTTGGGGCCAGGGCACCatgGTGACCGTGAGCAGC |
| 1253 | VH Ab93 | GAAGTGCAGCTGCTGGAAAGCGGCGGCGGCGTGGTGCAGCCGGGCCGTAGCCTGCGTCTGAG |
| | | CTGCGCGGCGAGCGGCTTTACCTTTAGCAGCTATGCGatgCATTGGGTGCGTCAGGCGCCGG |
| | | GCAAAGGCCTGGAATGGGTGGCGGTGATTAGCTATGATGGCAGCAACAAATATTATGCGGAT |
| | | AGCGTGAAAGGCCGTTTTACCATTAGCCGTGATAACAGCAAAAACACCCTGAGCCTGCAGat |
| | | gAACAGCCTGCGTGTGGAAGATACCGCGATTTATTATTGCGTGCGTGGCGCGGGCCTGGGCT |
| | | TTCCGTATGGCCCGGATGGCTTTGATATTTGGGGCCAGGGCACCatgGTGACCGTGAGCAGC |
| 1254 | VH Ab94 | GAAGTGCAGCTGCTGGAAAGCGGCGGCGGCGTGGTGCAGCCGGGCCGTAGCCTGCGTCTGAG |
| | | CTGCGCGGCGAGCGGCTTTACCTTTAGCAGCTATGCGatgCATTGGGTGCGTCAGGCGCCGG |
| | | GCAAAGGCCTGGAATGGGTGGCGGTGATTAGCTATGATGGCAGCAACAAATATTATGCGGAT |
| | | AGCGTGAAAGGCCGTTTTACCATTAGCCGTGATAACAGCAAAAACACCCTGAGCCTGCAGat |
| | | gAACAGCCTGCGTGTGGAAGATACCGCGATTTATTATTGCGTGCGTGGCGCGGGCCTGGGCT |
| | | GGCCGTATGGCCCGGATGGCTTTGATATTTGGGGCCAGGGCACCatgGTGACCGTGAGCAGC |
| 1255 | VH Ab95 | GAAGTGCAGCTGCTGGAAAGCGGCGGCGGCGTGGTGCAGCCGGGCCGTAGCCTGCGTCTGAG |
| | | CTGCGCGGCGAGCGGCTTTACCTTTAGCAGCTATGCGatgCATTGGGTGCGTCAGGCGCCGG |
| | | GCAAAGGCCTGGAATGGGTGGCGGTGATTAGCTATGATGGCAGCAACAAATATTATGCGGAT |
| | | AGCGTGAAAGGCCGTTTTACCATTAGCCGTGATAACAGCAAAAACACCCTGAGCCTGCAGat |
| | | gAACAGCCTGCGTGTGGAAGATACCGCGATTTATTATTGCGTGCGTGGCGCGGGCCTGGGCT |
| | | GGCCGTATGGCCCGGATGGCTTTGATATTTGGGGCCAGGGCACCatgGTGACCGTGAGCAGC |
| 1256 | VH Ab96 | GAAGTGCAGCTGCTGGAAAGCGGCGGCGGCGTGGTGCAGCCGGGCCGTAGCCTGCGTCTGAG |
| | | CTGCGCGGCGAGCGGCTTTACCTTTAGCAGCTATGCGatgCATTGGGTGCGTCAGGCGCCGG |
| | | GCAAAGGCCTGGAATGGGTGGCGGTGATTAGCTATGATGGCAGCAACAAATATTATGCGGAT |
| | | AGCGTGAAAGGCCGTTTTACCATTAGCCGTGATAACAGCAAAAACACCCTGAGCCTGCAGat |
| | | gAACAGCCTGCGTGTGGAAGATACCGCGATTTATTATTGCGTGCGTGGCGCGGGCCTGGGCT |
| | | GGCCGTATGGCCCGGATGGCTTTGATATTTGGGGCCAGGGCACCatgGTGACCGTGAGCAGC |
| 1257 | VH Ab97 | GAAGTGCAGCTGCTGGAAAGCGGCGGCGGCGTGGTGCAGCCGGGCCGTAGCCTGCGTCTGAG |
| | | CTGCGCGGCGAGCGGCTTTACCTTTAGCAGCTATGCGatgCATTGGGTGCGTCAGGCGCCGG |
| | | GCAAAGGCCTGGAATGGGTGGCGGTGATTAGCTATGATGGCAGCAACAAATATTATGCGGAT |
| | | AGCGTGAAAGGCCGTTTTACCATTAGCCGTGATAACAGCAAAAACACCCTGAGCCTGCAGat |
| | | gAACAGCCTGCGTGTGGAAGATACCGCGATTTATTATTGCGTGCGTGGCGCGGGCCTGGGCT |
| | | GGCCGTATGGCCCGGATGGCTTTGATATTTGGGGCCAGGGCACCatgGTGACCGTGAGCAGC |
| 1258 | VH Ab98 | GAAGTGCAGCTGCTGGAAAGCGGCGGCGGCGTGGTGCAGCCGGGCCGTAGCCTGCGTCTGAG |
| | | CTGCGCGGCGAGCGGCTTTACCTTTAGCAGCTATGCGatgCATTGGGTGCGTCAGGCGCCGG |
| | | GCAAAGGCCTGGAATGGGTGGCGGTGATTAGCTATGATGGCAGCAACAAATATTATGCGGAT |
| | | AGCGTGAAAGGCCGTTTTACCATTAGCCGTGATAACAGCAAAAACACCCTGAGCCTGCAGat |
| | | gAACAGCCTGCGTGTGGAAGATACCGCGATTTATTATTGCGTGCGTGGCGCGGGCCTGGGCT |
| | | GGCCGTATGGCCCGGATGGCTTTGATATTTGGGGCCAGGGCACCatgGTGACCGTGAGCAGC |
| 1259 | VH Ab99 | GAAGTGCAGCTGCTGGAAAGCGGCGGCGGCGTGGTGCAGCCGGGCCGTAGCCTGCGTCTGAG |
| | | CTGCGCGGCGAGCGGCTTTACCTTTAGCAGCTATGCGatgCATTGGGTGCGTCAGGCGCCGG |
| | | GCAAAGGCCTGGAATGGGTGGCGGTGATTAGCTATGATGGCAGCAACAAATATTATGCGGAT |
| | | AGCGTGAAAGGCCGTTTTACCATTAGCCGTGATAACAGCAAAAACACCCTGAGCCTGCAGat |
| | | gAACAGCCTGCGTGTGGAAGATACCGCGATTTATTATTGCGTGCGTGGCGCGGGCCTGGGCT |
| | | GGCCGTATGGCCCGGATGGCTTTGATATTTGGGGCCAGGGCACCatgGTGACCGTGAGCAGC |
| 1260 | VH Ab100 | GAAGTGCAGCTGCTGGAAAGCGGCGGCGGCGTGGTGCAGCCGGGCCGTAGCCTGCGTCTGAG |
| | | CTGCGCGGCGAGCGGCTTTACCTTTAGCAGCTATGCGatgCATTGGGTGCGTCAGGCGCCGG |
| | | GCAAAGGCCTGGAATGGGTGGCGGTGATTAGCTATGATGGCAGCAACAAATATTATGCGGAT |
| | | AGCGTGAAAGGCCGTTTTACCATTAGCCGTGATAACAGCAAAAACACCCTGAGCCTGCAGat |
| | | gAACAGCCTGCGTGTGGAAGATACCGCGATTTATTATTGCGTGCGTGGCGCGGGCCTGGGCT |
| | | GGCCGTATGGCCCGGATGGCTTTGATATTTGGGGCCAGGGCACCatgGTGACCGTGAGCAGC |
| 1261 | VH Ab101 | GAAGTGCAGCTGCTGGAAAGCGGCGGCGGCGTGGTGCAGCCGGGCCGTAGCCTGCGTCTGAG |
| | | CTGCGCGGCGAGCGGCTTTACCTTTAGCAGCTATGCGatgCATTGGGTGCGTCAGGCGCCGG |
| | | GCAAAGGCCTGGAATGGGTGGCGGTGATTAGCTATGATGGCAGCAACAAATATTATGCGGAT |
| | | AGCGTGAAAGGCCGTTTTACCATTAGCCGTGATAACAGCAAAAACACCCTGAGCCTGCAGat |
| | | gAACAGCCTGCGTGTGGAAGATACCGCGATTTATTATTGCGTGCGTGGCGCGGGCCGTGGCT |
| | | TTACCCTGGGCCCGGATGGCTTTGATATTTGGGGCCAGGGCACCatgGTGACCGTGAGCAGC |
| 1262 | VH Ab102 | GAAGTGCAGCTGCTGGAAAGCGGCGGCGGCGTGGTGCAGCCGGGCCGTAGCCTGCGTCTGAG |
| | | CTGCGCGGCGAGCGGCTTTACCTTTAGCAGCTATGCGatgCATTGGGTGCGTCAGGCGCCGG |
| | | GCAAAGGCCTGGAATGGGTGGCGGTGATTAGCTATGATGGCAGCAACAAATATTATGCGGAT |
| | | AGCGTGAAAGGCCGTTTTACCATTAGCCGTGATAACAGCAAAAACACCCTGAGCCTGCAGat |
| | | gAACAGCCTGCGTGTGGAAGATACCGCGATTTATTATTGCGTGCGTGGCGCGGGCCGTGGCT |
| | | TTACCCTGGGCCCGGATGGCTTTGATATTTGGGGCCAGGGCACCatgGTGACCGTGAGCAGC |
| 1263 | VH Ab103 | GAAGTGCAGCTGCTGGAAAGCGGCGGCGGCGTGGTGCAGCCGGGCCGTAGCCTGCGTCTGAG |
| | | CTGCGCGGCGAGCGGCTTTACCTTTAGCAGCTATGCGatgCATTGGGTGCGTCAGGCGCCGG |
| | | GCAAAGGCCTGGAATGGGTGGCGGTGATTAGCTATGATGGCAGCAACAAATATTATGCGGAT |
| | | AGCGTGAAAGGCCGTTTTACCATTAGCCGTGATAACAGCAAAAACACCCTGAGCCTGCAGat |
| | | gAACAGCCTGCGTGTGGAAGATACCGCGATTTATTATTGCGTGCGTGGCGCGGGCCGTGGCT |
| | | TTACCCTGGGCCCGGATGGCTTTGATATTTGGGGCCAGGGCACCatgGTGACCGTGAGCAGC |
| 1264 | VH Ab104 | GAAGTGCAGCTGCTGGAAAGCGGCGGCGGCGTGGTGCAGCCGGGCCGTAGCCTGCGTCTGAG |
| | | CTGCGCGGCGAGCGGCTTTACCTTTAGCAGCTATGCGatgCATTGGGTGCGTCAGGCGCCGG |
| | | GCAAAGGCCTGGAATGGGTGGCGGTGATTAGCTATGATGGCAGCAACAAATATTATGCGGAT |
| | | AGCGTGAAAGGCCGTTTTACCATTAGCCGTGATAACAGCAAAAACACCCTGAGCCTGCAGat |
| | | gAACAGCCTGCGTGTGGAAGATACCGCGATTTATTATTGCGTGCGTGGCGCGGGCCGTGGCT |
| | | TTACCCTGGGCCCGGATGGCTTTGATATTTGGGGCCAGGGCACCatgGTGACCGTGAGCAGC |
| 1265 | VH Ab105 | GAAGTGCAGCTGCTGGAAAGCGGCGGCGGCGTGGTGCAGCCGGGCCGTAGCCTGCGTCTGAG |
| | | CTGCGCGGCGAGCGGCTTTACCTTTAGCAGCTATGCGatgCATTGGGTGCGTCAGGCGCCGG |
| | | GCAAAGGCCTGGAATGGGTGGCGGTGATTAGCTATGATGGCAGCAACAAATATTATGCGGAT |
| | | AGCGTGAAAGGCCGTTTTACCATTAGCCGTGATAACAGCAAAAACACCCTGAGCCTGCAGat |
| | | gAACAGCCTGCGTGTGGAAGATACCGCGATTTATTATTGCGTGCGTGGCGCGGGCCGTGGCT |
| | | TTACCCTGGGCCCGGATGGCTTTGATATTTGGGGCCAGGGCACCatgGTGACCGTGAGCAGC |
| 1266 | VH Ab106 | GAAGTGCAGCTGCTGGAAAGCGGCGGCGGCGTGGTGCAGCCGGGCCGTAGCCTGCGTCTGAG |
| | | CTGCGCGGCGAGCGGCTTTACCTTTAGCAGCTATGCGatgCATTGGGTGCGTCAGGCGCCGG |
| | | GCAAAGGCCTGGAATGGGTGGCGGTGATTAGCTATGATGGCAGCAACAAATATTATGCGGAT |
| | | AGCGTGAAAGGCCGTTTTACCATTAGCCGTGATAACAGCAAAAACACCCTGAGCCTGCAGat |
| | | gAACAGCCTGCGTGTGGAAGATACCGCGATTTATTATTGCGTGCGTGGCGCGGGCCGTGGCT |
| | | TTACCCTGGGCCCGGATGGCTTTGATATTTGGGGCCAGGGCACCatgGTGACCGTGAGCAGC |
| 1267 | VH Ab107 | GAAGTGCAGCTGCTGGAAAGCGGCGGCGGCGTGGTGCAGCCGGGCCGTAGCCTGCGTCTGAG |
| | | CTGCGCGGCGAGCGGCTTTACCTTTAGCAGCTATGCGatgCATTGGGTGCGTCAGGCGCCGG |
| | | GCAAAGGCCTGGAATGGGTGGCGGTGATTAGCTATGATGGCAGCAACAAATATTATGCGGAT |
| | | AGCGTGAAAGGCCGTTTTACCATTAGCCGTGATAACAGCAAAAACACCCTGAGCCTGCAGat |
| | | gAACAGCCTGCGTGTGGAAGATACCGCGATTTATTATTGCGTGCGTGGCGCGGGCCGTGGCT |
| | | TTACCCTGGGCCCGGATGGCTTTGATATTTGGGGCCAGGGCACCatgGTGACCGTGAGCAGC |
| 1268 | VL Ab16 | GATATTGTGatgACCCAGACCCCGCTGAGCCTGAGCGTGACCCCGGGCCAGCCGGCGAGCAT |
| | | TAGCTGCAAAAGCAGCCGTAGCCTGCTGCATAGCGATGGCAAAACCTATGTGTATTGGTATG |
| | | TGCAGAAAAGCGGCCAGCCGCCGCAGCTGCTGATTTATGAACTGAGCAACCGTTTTAGCGGC |
| | | GTGCCGGATCGTTTTAGCGGCAGCGGCAGCCGTACCGATTTTACCCTGAAAATTAGCCGTGT |
| | | GGAAGCGGAAGATGTGGGCGTGTATTATTGCatgCAGTATATTGAAGCGCCGCTGACCTTTG |
| | | GCGGCGGCACCAAAGTGGAAATTAAA |
| 1269 | VL Ab17 | GATATTGTGatgACCCAGACCCCGCTGAGCCTGAGCGTGACCCCGGGCCAGCCGGCGAGCAT |
| | | TAGCTGCAAAAGCAGCCGTAGCCTGCTGCATAGCGATGGCAAAACCTATGTGTATTGGTATG |
| | | TGCAGAAAAGCGGCCAGCCGCCGCAGCTGCTGATTTATGAACTGAGCAACCGTTTTAGCGGC |
| | | GTGCCGGATCGTTTTAGCGGCAGCGGCAGCCGTACCGATTTTACCCTGAAAATTAGCCGTGT |
| | | GGAAGCGGAAGATGTGGGCGTGTATTATTGCatgCAGTATATTGAAGCGCCGCTGACCTTTG |
| | | GCGGCGGCACCAAAGTGGAAATTAAA |
| 1270 | VL Ab18 | GATATTGTGatgACCCAGACCCCGCTGAGCCTGAGCGTGACCCCGGGCCAGCCGGCGAGCAT |
| | | TAGCTGCAAAAGCAGCCGTAGCCTGCTGCATAGCGATGGCAAAACCTATGTGTATTGGTATG |
| | | TGCAGAAAAGCGGCCAGCCGCCGCAGCTGCTGATTTATGAACTGAGCAACCGTTTTAGCGGC |
| | | GTGCCGGATCGTTTTAGCGGCAGCGGCAGCCGTACCGATTTTACCCTGAAAATTAGCCGTGT |
| | | GGAAGCGGAAGATGTGGGCGTGTATTATTGCatgCAGTATATTGAAGCGCCGCTGACCTTTG |
| | | GCGGCGGCACCAAAGTGGAAATTAAA |
| 1271 | VL Ab19 | GATATTGTGatgACCCAGACCCCGCTGAGCCTGAGCGTGACCCCGGGCCAGCCGGCGAGCAT |
| | | TAGCTGCAAAAGCAGCCGTAGCCTGCTGCATAGCGATGGCAAAACCTATGTGTATTGGTATG |
| | | TGCAGAAAAGCGGCCAGCCGCCGCAGCTGCTGATTTATGAACTGAGCAACCGTTTTAGCGGC |
| | | GTGCCGGATCGTTTTAGCGGCAGCGGCAGCCGTACCGATTTTACCCTGAAAATTAGCCGTGT |
| | | GGAAGCGGAAGATGTGGGCGTGTATTATTGCatgCAGTATATTGAAGCGCCGCTGACCTTTG |
| | | GCGGCGGCACCAAAGTGGAAATTAAA |
| 1272 | VL Ab20 | GATATTGTGatgACCCAGACCCCGCTGAGCCTGAGCGTGACCCCGGGCCAGCCGGCGAGCAT |
| | | TAGCTGCAAAAGCAGCCGTAGCCTGCTGCATAGCGATGGCAAAACCTATGTGTATTGGTATG |
| | | TGCAGAAAAGCGGCCAGCCGCCGCAGCTGCTGATTTATGAACTGAGCAACCGTTTTAGCGGC |
| | | GTGCCGGATCGTTTTAGCGGCAGCGGCAGCCGTACCGATTTTACCCTGAAAATTAGCCGTGT |
| | | GGAAGCGGAAGATGTGGGCGTGTATTATTGCatgCAGTATATTGAAGCGCCGCTGACCTTTG |
| | | GCGGCGGCACCAAAGTGGAAATTAAA |
| 1273 | VL Ab21 | GATATTGTGatgACCCAGACCCCGCTGAGCCTGAGCGTGACCCCGGGCCAGCCGGCGAGCAT |
| | | TAGCTGCAAAAGCAGCCGTAGCCTGCTGCATAGCGATGGCAAAACCTATGTGTATTGGTATG |
| | | TGCAGAAAAGCGGCCAGCCGCCGCAGCTGCTGATTTATGAACTGAGCAACCGTTTTAGCGGC |
| | | GTGCCGGATCGTTTTAGCGGCAGCGGCAGCCGTACCGATTTTACCCTGAAAATTAGCCGTGT |
| | | GGAAGCGGAAGATGTGGGCGTGTATTATTGCatgCAGTATATTGAAGCGCCGCTGACCTTTG |
| | | GCGGCGGCACCAAAGTGGAAATTAAA |
| 1274 | VL Ab22 | GATATTGTGatgACCCAGACCCCGCTGAGCCTGAGCGTGACCCCGGGCCAGCCGGCGAGCAT |
| | | TAGCTGCAAAAGCAGCCGTAGCCTGCTGCATAGCGATGGCAAAACCTATGTGTATTGGTATG |
| | | TGCAGAAAAGCGGCCAGCCGCCGCAGCTGCTGATTTATGAACTGAGCAACCGTTTTAGCGGC |
| | | GTGCCGGATCGTTTTAGCGGCAGCGGCAGCCGTACCGATTTTACCCTGAAAATTAGCCGTGT |
| | | GGAAGCGGAAGATGTGGGCGTGTATTATTGCatgCAGTATATTGAAGCGCCGCTGACCTTTG |
| | | GCGGCGGCACCAAAGTGGAAATTAAA |
| 1275 | VL Ab23 | GATATTGTGatgACCCAGACCCCGCTGAGCCTGAGCGTGACCCCGGGCCAGCCGGCGAGCAT |
| | | TAGCTGCAAAAGCAGCCGTAGCCTGCTGCATAGCGATGGCAAAACCTATGTGTATTGGTATG |
| | | TGCAGAAAAGCGGCCAGCCGCCGCAGCTGCTGATTTATGAACTGAGCAACCGTTTTAGCGGC |
| | | GTGCCGGATCGTTTTAGCGGCAGCGGCAGCCGTACCGATTTTACCCTGAAAATTAGCCGTGT |
| | | GGAAGCGGAAGATGTGGGCGTGTATTATTGCatgCAGTATATTGAAGCGCCGCTGACCTTTG |
| | | GCGGCGGCACCAAAGTGGAAATTAAA |
| 1276 | VL Ab24 | GATATTGTGatgACCCAGACCCCGCTGAGCCTGAGCGTGACCCCGGGCCAGCCGGCGAGCAT |
| | | TAGCTGCAAAAGCAGCCGTAGCCTGCTGCATAGCGATGGCAAAACCTATGTGTATTGGTATG |
| | | TGCAGAAAAGCGGCCAGCCGCCGCAGCTGCTGATTTATGAACTGAGCAACCGTTTTAGCGGC |
| | | GTGCCGGATCGTTTTAGCGGCAGCGGCAGCCGTACCGATTTTACCCTGAAAATTAGCCGTGT |
| | | GGAAGCGGAAGATGTGGGCGTGTATTATTGCatgCAGTATATTGAAGCGCCGCTGACCTTTG |
| | | GCGGCGGCACCAAAGTGGAAATTAAA |
| 1277 | VL Ab25 | GATATTGTGatgACCCAGACCCCGCTGAGCCTGAGCGTGACCCCGGGCCAGCCGGCGAGCAT |
| | | TAGCTGCAAAAGCAGCCGTAGCCTGCTGCATAGCGATGGCAAAACCTATGTGTATTGGTATG |
| | | TGCAGAAAAGCGGCCAGCCGCCGCAGCTGCTGATTTATGAACTGAGCAACCGTTTTAGCGGC |
| | | GTGCCGGATCGTTTTAGCGGCAGCGGCAGCCGTACCGATTTTACCCTGAAAATTAGCCGTGT |
| | | GGAAGCGGAAGATGTGGGCGTGTATTATTGCatgCAGTATATTGAAGCGCCGCTGACCTTTG |
| | | GCGGCGGCACCAAAGTGGAAATTAAA |
| 1278 | VL Ab26 | GATATTGTGatgACCCAGACCCCGCTGAGCCTGAGCGTGACCCCGGGCCAGCCGGCGAGCAT |
| | | TAGCTGCAAAAGCAGCCGTAGCCTGCTGCATAGCGATGGCAAAACCTATGTGTATTGGTATG |
| | | TGCAGAAAAGCGGCCAGCCGCCGCAGCTGCTGATTTATGAACTGAGCAACCGTTTTAGCGGC |
| | | GTGCCGGATCGTTTTAGCGGCAGCGGCAGCCGTACCGATTTTACCCTGAAAATTAGCCGTGT |
| | | GGAAGCGGAAGATGTGGGCGTGTATTATTGCatgCAGTATATTGAAGCGCCGCTGACCTTTG |
| | | GCGGCGGCACCAAAGTGGAAATTAAA |
| 1279 | VL Ab27 | GATATTGTGatgACCCAGACCCCGCTGAGCCTGAGCGTGACCCCGGGCCAGCCGGCGAGCAT |
| | | TAGCTGCAAAAGCAGCCGTAGCCTGCTGCATAGCGATGGCAAAACCTATGTGTATTGGTATG |
| | | TGCAGAAAAGCGGCCAGCCGCCGCAGCTGCTGATTTATGAACTGAGCAACCGTTTTAGCGGC |
| | | GTGCCGGATCGTTTTAGCGGCAGCGGCAGCCGTACCGATTTTACCCTGAAAATTAGCCGTGT |
| | | GGAAGCGGAAGATGTGGGCGTGTATTATTGCatgCAGTATATTGAAGCGCCGCTGACCTTTG |
| | | GCGGCGGCACCAAAGTGGAAATTAAA |
| 1280 | VL Ab28 | GATATTGTGatgACCCAGACCCCGCTGAGCCTGAGCGTGACCCCGGGCCAGCCGGCGAGCAT |
| | | TAGCTGCAAAAGCAGCCGTAGCCTGCTGCATAGCGATGGCAAAACCTATGTGTATTGGTATG |
| | | TGCAGAAAAGCGGCCAGCCGCCGCAGCTGCTGATTTATGAACTGAGCAACCGTTTTAGCGGC |
| | | GTGCCGGATCGTTTTAGCGGCAGCGGCAGCCGTACCGATTTTACCCTGAAAATTAGCCGTGT |
| | | GGAAGCGGAAGATGTGGGCGTGTATTATTGCatgCAGTATATTGAAGCGCCGCTGACCTTTG |
| | | GCGGCGGCACCAAAGTGGAAATTAAA |
| 1281 | VL Ab29 | GATATTGTGatgACCCAGACCCCGCTGAGCCTGAGCGTGACCCCGGGCCAGCCGGCGAGCAT |
| | | TAGCTGCACCAGCAGCCGTAGCCTGCTGCATAGCGATGGCAAAACCTATGTGTATTGGTATG |
| | | TGCAGAAAAGCGGCCAGCCGCCGCAGCTGCTGATTTATGAACTGAGCAACCGTTTTAGCGGC |
| | | GTGCCGGATCGTTTTAGCGGCAGCGGCAGCCGTACCGATTTTACCCTGAAAATTAGCCGTGT |
| | | GGAAGCGGAAGATGTGGGCGTGTATTATTGCatgCAGTATGTGGAAGCGCCGCTGACCTTTG |
| | | GCGGCGGCACCAAAGTGGAAATTAAA |
| 1282 | VL Ab30 | GATATTGTGatgACCCAGACCCCGCTGAGCCTGAGCGTGACCCCGGGCCAGCCGGCGAGCAT |
| | | TAGCTGCACCAGCAGCCGTAGCCTGCTGCATAGCGATGGCAAAACCTATGTGTATTGGTATG |
| | | TGCAGAAAAGCGGCCAGCCGCCGCAGCTGCTGATTTATGAACTGAGCAACCGTTTTAGCGGC |
| | | GTGCCGGATCGTTTTAGCGGCAGCGGCAGCCGTACCGATTTTACCCTGAAAATTAGCCGTGT |
| | | GGAAGCGGAAGATGTGGGCGTGTATTATTGCatgCAGTATGTGGAAGCGCCGCTGACCTTTG |
| | | GCGGCGGCACCAAAGTGGAAATTAAA |
| 1283 | VL Ab31 | GATATTGTGatgACCCAGACCCCGCTGAGCCTGAGCGTGACCCCGGGCCAGCCGGCGAGCAT |
| | | TAGCTGCACCAGCAGCCGTAGCCTGCTGCATAGCGATGGCAAAACCTATGTGTATTGGTATG |
| | | TGCAGAAAAGCGGCCAGCCGCCGCAGCTGCTGATTTATGAACTGAGCAACCGTTTTAGCGGC |
| | | GTGCCGGATCGTTTTAGCGGCAGCGGCAGCCGTACCGATTTTACCCTGAAAATTAGCCGTGT |
| | | GGAAGCGGAAGATGTGGGCGTGTATTATTGCatgCAGTATGTGGAAGCGCCGCTGACCTTTG |
| | | GCGGCGGCACCAAAGTGGAAATTAAA |
| 1284 | VL Ab32 | GATATTGTGatgACCCAGACCCCGCTGAGCCTGAGCGTGACCCCGGGCCAGCCGGCGAGCAT |
| | | TAGCTGCACCAGCAGCCGTAGCCTGCTGCATAGCGATGGCAAAACCTATGTGTATTGGTATG |
| | | TGCAGAAAAGCGGCCAGCCGCCGCAGCTGCTGATTTATGAACTGAGCAACCGTTTTAGCGGC |
| | | GTGCCGGATCGTTTTAGCGGCAGCGGCAGCCGTACCGATTTTACCCTGAAAATTAGCCGTGT |
| | | GGAAGCGGAAGATGTGGGCGTGTATTATTGCatgCAGTATGTGGAAGCGCCGCTGACCTTTG |
| | | GCGGCGGCACCAAAGTGGAAATTAAA |
| 1285 | VL Ab33 | GATATTGTGatgACCCAGACCCCGCTGAGCCTGAGCGTGACCCCGGGCCAGCCGGCGAGCAT |
| | | TAGCTGCACCAGCAGCCGTAGCCTGCTGCATAGCGATGGCAAAACCTATGTGTATTGGTATG |
| | | TGCAGAAAAGCGGCCAGCCGCCGCAGCTGCTGATTTATGAACTGAGCAACCGTTTTAGCGGC |
| | | GTGCCGGATCGTTTTAGCGGCAGCGGCAGCCGTACCGATTTTACCCTGAAAATTAGCCGTGT |
| | | GGAAGCGGAAGATGTGGGCGTGTATTATTGCatgCAGTATGTGGAAGCGCCGCTGACCTTTG |
| | | GCGGCGGCACCAAAGTGGAAATTAAA |
| 1286 | VL Ab34 | GATATTGTGatgACCCAGACCCCGCTGAGCCTGAGCGTGACCCCGGGCCAGCCGGCGAGCAT |
| | | TAGCTGCACCAGCAGCCGTAGCCTGCTGCATAGCGATGGCAAAACCTATGTGTATTGGTATG |
| | | TGCAGAAAAGCGGCCAGCCGCCGCAGCTGCTGATTTATGAACTGAGCAACCGTTTTAGCGGC |
| | | GTGCCGGATCGTTTTAGCGGCAGCGGCAGCCGTACCGATTTTACCCTGAAAATTAGCCGTGT |
| | | GGAAGCGGAAGATGTGGGCGTGTATTATTGCatgCAGTATGTGGAAGCGCCGCTGACCTTTG |
| | | GCGGCGGCACCAAAGTGGAAATTAAA |
| 1287 | VL Ab35 | GATATTGTGatgACCCAGACCCCGCTGAGCCTGAGCGTGACCCCGGGCCAGCCGGCGAGCAT |
| | | TAGCTGCACCAGCAGCCGTAGCCTGCTGCATAGCGATGGCAAAACCTATGTGTATTGGTATG |
| | | TGCAGAAAAGCGGCCAGCCGCCGCAGCTGCTGATTTATGAACTGAGCAACCGTTTTAGCGGC |
| | | GTGCCGGATCGTTTTAGCGGCAGCGGCAGCCGTACCGATTTTACCCTGAAAATTAGCCGTGT |
| | | GGAAGCGGAAGATGTGGGCGTGTATTATTGCatgCAGTATGTGGAAGCGCCGCTGACCTTTG |
| | | GCGGCGGCACCAAAGTGGAAATTAAA |
| 1288 | VL Ab36 | GATATTGTGatgACCCAGACCCCGCTGAGCCTGAGCGTGACCCCGGGCCAGCCGGCGAGCAT |
| | | TAGCTGCCGTAGCAGCCGTAGCCTGCTGCATAGCGATGGCAAAACCTATGTGTATTGGTATG |
| | | TGCAGAAAAGCGGCCAGCCGCCGCAGCTGCTGATTTATGAACTGAGCAACCGTTTTAGCGGC |
| | | GTGCCGGATCGTTTTAGCGGCAGCGGCAGCCGTACCGATTTTACCCTGAAAATTAGCCGTGT |
| | | GGAAGCGGAAGATGTGGGCGTGTATTATTGCatgCAGTATATTGAAGCGCCGCTGACCTTTG |
| | | GCGGCGGCACCAAAGTGGAAATTAAA |
| 1289 | VL Ab37 | GATATTGTGatgACCCAGACCCCGCTGAGCCTGAGCGTGACCCCGGGCCAGCCGGCGAGCAT |
| | | TAGCTGCCGTAGCAGCCGTAGCCTGCTGCATAGCGATGGCAAAACCTATGTGTATTGGTATG |
| | | TGCAGAAAAGCGGCCAGCCGCCGCAGCTGCTGATTTATGAACTGAGCAACCGTTTTAGCGGC |
| | | GTGCCGGATCGTTTTAGCGGCAGCGGCAGCCGTACCGATTTTACCCTGAAAATTAGCCGTGT |
| | | GGAAGCGGAAGATGTGGGCGTGTATTATTGCatgCAGTATATTGAAGCGCCGCTGACCTTTG |
| | | GCGGCGGCACCAAAGTGGAAATTAAA |
| 1290 | VL Ab38 | GATATTGTGatgACCCAGACCCCGCTGAGCCTGAGCGTGACCCCGGGCCAGCCGGCGAGCAT |
| | | TAGCTGCCGTAGCAGCCGTAGCCTGCTGCATAGCGATGGCAAAACCTATGTGTATTGGTATG |
| | | TGCAGAAAAGCGGCCAGCCGCCGCAGCTGCTGATTTATGAACTGAGCAACCGTTTTAGCGGC |
| | | GTGCCGGATCGTTTTAGCGGCAGCGGCAGCCGTACCGATTTTACCCTGAAAATTAGCCGTGT |
| | | GGAAGCGGAAGATGTGGGCGTGTATTATTGCatgCAGTATATTGAAGCGCCGCTGACCTTTG |
| | | GCGGCGGCACCAAAGTGGAAATTAAA |
| 1291 | VL Ab39 | GATATTGTGatgACCCAGACCCCGCTGAGCCTGAGCGTGACCCCGGGCCAGCCGGCGAGCAT |
| | | TAGCTGCCGTAGCAGCCGTAGCCTGCTGCATAGCGATGGCAAAACCTATGTGTATTGGTATG |
| | | TGCAGAAAAGCGGCCAGCCGCCGCAGCTGCTGATTTATGAACTGAGCAACCGTTTTAGCGGC |
| | | GTGCCGGATCGTTTTAGCGGCAGCGGCAGCCGTACCGATTTTACCCTGAAAATTAGCCGTGT |
| | | GGAAGCGGAAGATGTGGGCGTGTATTATTGCatgCAGTATATTGAAGCGCCGCTGACCTTTG |
| | | GCGGCGGCACCAAAGTGGAAATTAAA |
| 1292 | VL Ab40 | GATATTGTGatgACCCAGACCCCGCTGAGCCTGAGCGTGACCCCGGGCCAGCCGGCGAGCAT |
| | | TAGCTGCCGTAGCAGCCGTAGCCTGCTGCATAGCGATGGCAAAACCTATGTGTATTGGTATG |
| | | TGCAGAAAAGCGGCCAGCCGCCGCAGCTGCTGATTTATGAACTGAGCAACCGTTTTAGCGGC |
| | | GTGCCGGATCGTTTTAGCGGCAGCGGCAGCCGTACCGATTTTACCCTGAAAATTAGCCGTGT |
| | | GGAAGCGGAAGATGTGGGCGTGTATTATTGCatgCAGTATATTGAAGCGCCGCTGACCTTTG |
| | | GCGGCGGCACCAAAGTGGAAATTAAA |
| 1293 | VL Ab41 | GATATTGTGatgACCCAGACCCCGCTGAGCCTGAGCGTGACCCCGGGCCAGCCGGCGAGCAT |
| | | TAGCTGCCGTAGCAGCCGTAGCCTGCTGCATAGCGATGGCAAAACCTATGTGTATTGGTATG |
| | | TGCAGAAAAGCGGCCAGCCGCCGCAGCTGCTGATTTATGAACTGAGCAACCGTTTTAGCGGC |
| | | GTGCCGGATCGTTTTAGCGGCAGCGGCAGCCGTACCGATTTTACCCTGAAAATTAGCCGTGT |
| | | GGAAGCGGAAGATGTGGGCGTGTATTATTGCatgCAGTATATTGAAGCGCCGCTGACCTTTG |
| | | GCGGCGGCACCAAAGTGGAAATTAAA |
| 1294 | VL Ab42 | GATATTGTGatgACCCAGACCCCGCTGAGCCTGAGCGTGACCCCGGGCCAGCCGGCGAGCAT |
| | | TAGCTGCCGTAGCAGCCGTAGCCTGCTGCATAGCGATGGCAAAACCTATGTGTATTGGTATG |
| | | TGCAGAAAAGCGGCCAGCCGCCGCAGCTGCTGATTTATGAACTGAGCAACCGTTTTAGCGGC |
| | | GTGCCGGATCGTTTTAGCGGCAGCGGCAGCCGTACCGATTTTACCCTGAAAATTAGCCGTGT |
| | | GGAAGCGGAAGATGTGGGCGTGTATTATTGCatgCAGTATATTGAAGCGCCGCTGACCTTTG |
| | | GCGGCGGCACCAAAGTGGAAATTAAA |
| 1295 | VL Ab43 | GATATTGTGatgACCCAGACCCCGCTGAGCCTGAGCGTGACCCCGGGCCAGCCGGCGAGCAT |
| | | TAGCTGCCGTAGCAGCCGTAGCCTGCTGCATAGCGATGGCAAAACCTATGTGTATTGGTATG |
| | | TGCAGAAAAGCGGCCAGCCGCCGCAGCTGCTGATTTATGAACTGAGCAACCGTTTTAGCGGC |
| | | GTGCCGGATCGTTTTAGCGGCAGCGGCAGCCGTACCGATTTTACCCTGAAAATTAGCCGTGT |
| | | GGAAGCGGAAGATGTGGGCGTGTATTATTGCatgCAGTATATTGAAGCGCCGCTGACCTTTG |
| | | GCGGCGGCACCAAAGTGGAAATTAAA |
| 1296 | VL Ab44 | GATATTGTGatgACCCAGACCCCGCTGAGCCTGAGCGTGACCCCGGGCCAGCCGGCGAGCAT |
| | | TAGCTGCCGTAGCAGCCGTAGCCTGCTGCATAGCGATGGCAAAACCTATGTGTATTGGTATG |
| | | TGCAGAAAAGCGGCCAGCCGCCGCAGCTGCTGATTTATGAACTGAGCAACCGTTTTAGCGGC |
| | | GTGCCGGATCGTTTTAGCGGCAGCGGCAGCCGTACCGATTTTACCCTGAAAATTAGCCGTGT |
| | | GGAAGCGGAAGATGTGGGCGTGTATTATTGCatgCAGTATATTGAAGCGCCGCTGACCTTTG |
| | | GCGGCGGCACCAAAGTGGAAATTAAA |
| 1297 | VL Ab45 | GATATTGTGatgACCCAGACCCCGCTGAGCCTGAGCGTGACCCCGGGCCAGCCGGCGAGCAT |
| | | TAGCTGCCGTAGCAGCCGTAGCCTGCTGCATAGCGATGGCAAAACCTATGTGTATTGGTATG |
| | | TGCAGAAAAGCGGCCAGCCGCCGCAGCTGCTGATTTATGAACTGAGCAACCGTTTTAGCGGC |
| | | GTGCCGGATCGTTTTAGCGGCAGCGGCAGCCGTACCGATTTTACCCTGAAAATTAGCCGTGT |
| | | GGAAGCGGAAGATGTGGGCGTGTATTATTGCatgCAGTATATTGAAGCGCCGCTGACCTTTG |
| | | GCGGCGGCACCAAAGTGGAAATTAAA |
| 1298 | VL Ab46 | GATATTGTGatgACCCAGACCCCGCTGAGCCTGAGCGTGACCCCGGGCCAGCCGGCGAGCAT |
| | | TAGCTGCCGTAGCAGCCGTAGCCTGCTGCATAGCGATGGCAAAACCTATGTGTATTGGTATG |
| | | TGCAGAAAAGCGGCCAGCCGCCGCAGCTGCTGATTTATGAACTGAGCAACCGTTTTAGCGGC |
| | | GTGCCGGATCGTTTTAGCGGCAGCGGCAGCCGTACCGATTTTACCCTGAAAATTAGCCGTGT |
| | | GGAAGCGGAAGATGTGGGCGTGTATTATTGCatgCAGTATATTGAAGCGCCGCTGACCTTTG |
| | | GCGGCGGCACCAAAGTGGAAATTAAA |
| 1299 | VL Ab47 | GATATTGTGatgACCCAGACCCCGCTGAGCCTGAGCGTGACCCCGGGCCAGCCGGCGAGCAT |
| | | TAGCTGCCGTAGCAGCCGTAGCCTGCTGCATAGCGATGGCAAAACCTATGTGTATTGGTATG |
| | | TGCAGAAAAGCGGCCAGCCGCCGCAGCTGCTGATTTATGAACTGAGCAACCGTTTTAGCGGC |
| | | GTGCCGGATCGTTTTAGCGGCAGCGGCAGCCGTACCGATTTTACCCTGAAAATTAGCCGTGT |
| | | GGAAGCGGAAGATGTGGGCGTGTATTATTGCatgCAGTATATTGAAGCGCCGCTGACCTTTG |
| | | GCGGCGGCACCAAAGTGGAAATTAAA |
| 1300 | VL Ab48 | GATATTGTGatgACCCAGACCCCGCTGAGCCTGAGCGTGACCCCGGGCCAGCCGGCGAGCAT |
| | | TAGCTGCCGTAGCAGCCGTAGCCTGCTGCATAGCGATGGCAAAACCTATGTGTATTGGTATG |
| | | TGCAGAAAAGCGGCCAGCCGCCGCAGCTGCTGATTTATGAACTGAGCAACCGTTTTAGCGGC |
| | | GTGCCGGATCGTTTTAGCGGCAGCGGCAGCCGTACCGATTTTACCCTGAAAATTAGCCGTGT |
| | | GGAAGCGGAAGATGTGGGCGTGTATTATTGCatgCAGTATATTGAAGCGCCGCTGACCTTTG |
| | | GCGGCGGCACCAAAGTGGAAATTAAA |
| 1301 | VL Ab49 | GATATTGTGatgACCCAGACCCCGCTGAGCCTGAGCGTGACCCCGGGCCAGCCGGCGAGCAT |
| | | TAGCTGCCGTAGCAGCCGTAGCCTGCTGCATAGCGATGGCAAAACCTATGTGTATTGGTATG |
| | | TGCAGAAAAGCGGCCAGCCGCCGCAGCTGCTGATTTATGAACTGAGCAACCGTTTTAGCGGC |
| | | GTGCCGGATCGTTTTAGCGGCAGCGGCAGCCGTACCGATTTTACCCTGAAAATTAGCCGTGT |
| | | GGAAGCGGAAGATGTGGGCGTGTATTATTGCatgCAGTATATTGAAGCGCCGCTGACCTTTG |
| | | GCGGCGGCACCAAAGTGGAAATTAAA |
| 1302 | VL Ab50 | GATATTGTGatgACCCAGACCCCGCTGAGCCTGAGCGTGACCCCGGGCCAGCCGGCGAGCAT |
| | | TAGCTGCCGTAGCAGCCGTAGCCTGCTGCATAGCGATGGCAAAACCTATGTGTATTGGTATG |
| | | TGCAGAAAAGCGGCCAGCCGCCGCAGCTGCTGATTTATGAACTGAGCAACCGTTTTAGCGGC |
| | | GTGCCGGATCGTTTTAGCGGCAGCGGCAGCCGTACCGATTTTACCCTGAAAATTAGCCGTGT |
| | | GGAAGCGGAAGATGTGGGCGTGTATTATTGCatgCAGTATATTGAAGCGCCGCTGACCTTTG |
| | | GCGGCGGCACCAAAGTGGAAATTAAA |
| 1303 | VL Ab51 | GATATTGTGatgACCCAGACCCCGCTGAGCCTGAGCGTGACCCCGGGCCAGCCGGCGAGCAT |
| | | TAGCTGCCGTAGCAGCCGTAGCCTGCTGCATAGCGATGGCAAAACCTATGTGTATTGGTATG |
| | | TGCAGAAAAGCGGCCAGCCGCCGCAGCTGCTGATTTATGAACTGAGCAACCGTTTTAGCGGC |
| | | GTGCCGGATCGTTTTAGCGGCAGCGGCAGCCGTACCGATTTTACCCTGAAAATTAGCCGTGT |
| | | GGAAGCGGAAGATGTGGGCGTGTATTATTGCatgCAGTATATTGAAGCGCCGCTGACCTTTG |
| | | GCGGCGGCACCAAAGTGGAAATTAAA |
| 1304 | VL Ab52 | GATATTGTGatgACCCAGACCCCGCTGAGCCTGAGCGTGACCCCGGGCCAGCCGGCGAGCAT |
| | | TAGCTGCCGTAGCAGCCGTAGCCTGCTGCATAGCGATGGCAAAACCTATGTGTATTGGTATG |
| | | TGCAGAAAAGCGGCCAGCCGCCGCAGCTGCTGATTTATGAACTGAGCAACCGTTTTAGCGGC |
| | | GTGCCGGATCGTTTTAGCGGCAGCGGCAGCCGTACCGATTTTACCCTGAAAATTAGCCGTGT |
| | | GGAAGCGGAAGATGTGGGCGTGTATTATTGCatgCAGTATATTGAAGCGCCGCTGACCTTTG |
| | | GCGGCGGCACCAAAGTGGAAATTAAA |
| 1305 | VL Ab53 | GATATTGTGatgACCCAGACCCCGCTGAGCCTGAGCGTGACCCCGGGCCAGCCGGCGAGCAT |
| | | TAGCTGCCGTAGCAGCCGTAGCCTGCTGCATAGCGATGGCAAAACCTATGTGTATTGGTATG |
| | | TGCAGAAAAGCGGCCAGCCGCCGCAGCTGCTGATTTATGAACTGAGCAACCGTTTTAGCGGC |
| | | GTGCCGGATCGTTTTAGCGGCAGCGGCAGCCGTACCGATTTTACCCTGAAAATTAGCCGTGT |
| | | GGAAGCGGAAGATGTGGGCGTGTATTATTGCatgCAGTATATTGAAGCGCCGCTGACCTTTG |
| | | GCGGCGGCACCAAAGTGGAAATTAAA |
| 1306 | VL Ab54 | GATATTGTGatgACCCAGACCCCGCTGAGCCTGAGCGTGACCCCGGGCCAGCCGGCGAGCAT |
| | | TAGCTGCACCAGCAGCCGTAGCCTGCTGCATAGCGATGGCAAAACCTATGTGTATTGGTATG |
| | | TGCAGAAAAGCGGCCAGCCGCCGCAGCTGCTGATTTATGAACTGAGCAACCGTTTTAGCGGC |
| | | GTGCCGGATCGTTTTAGCGGCAGCGGCAGCCGTACCGATTTTACCCTGAAAATTAGCCGTGT |
| | | GGAAGCGGAAGATGTGGGCGTGTATTATTGCatgCAGTATATTGAAGCGCCGCTGACCTTTG |
| | | GCGGCGGCACCAAAGTGGAAATTAAA |
| 1307 | VL Ab55 | GATATTGTGatgACCCAGACCCCGCTGAGCCTGAGCGTGACCCCGGGCCAGCCGGCGAGCAT |
| | | TAGCTGCACCAGCAGCCGTAGCCTGCTGCATAGCGATGGCAAAACCTATGTGTATTGGTATG |
| | | TGCAGAAAAGCGGCCAGCCGCCGCAGCTGCTGATTTATGAACTGAGCAACCGTTTTAGCGGC |
| | | GTGCCGGATCGTTTTAGCGGCAGCGGCAGCCGTACCGATTTTACCCTGAAAATTAGCCGTGT |
| | | GGAAGCGGAAGATGTGGGCGTGTATTATTGCatgCAGTATATTGAAGCGCCGCTGACCTTTG |
| | | GCGGCGGCACCAAAGTGGAAATTAAA |
| 1308 | VL Ab56 | GATATTGTGatgACCCAGACCCCGCTGAGCCTGAGCGTGACCCCGGGCCAGCCGGCGAGCAT |
| | | TAGCTGCACCAGCAGCCGTAGCCTGCTGCATAGCGATGGCAAAACCTATGTGTATTGGTATG |
| | | TGCAGAAAAGCGGCCAGCCGCCGCAGCTGCTGATTTATGAACTGAGCAACCGTTTTAGCGGC |
| | | GTGCCGGATCGTTTTAGCGGCAGCGGCAGCCGTACCGATTTTACCCTGAAAATTAGCCGTGT |
| | | GGAAGCGGAAGATGTGGGCGTGTATTATTGCatgCAGTATATTGAAGCGCCGCTGACCTTTG |
| | | GCGGCGGCACCAAAGTGGAAATTAAA |
| 1309 | VL Ab57 | GATATTGTGatgACCCAGACCCCGCTGAGCCTGAGCGTGACCCCGGGCCAGCCGGCGAGCAT |
| | | TAGCTGCACCAGCAGCCGTAGCCTGCTGCATAGCGATGGCAAAACCTATGTGTATTGGTATG |
| | | TGCAGAAAAGCGGCCAGCCGCCGCAGCTGCTGATTTATGAACTGAGCAACCGTTTTAGCGGC |
| | | GTGCCGGATCGTTTTAGCGGCAGCGGCAGCCGTACCGATTTTACCCTGAAAATTAGCCGTGT |
| | | GGAAGCGGAAGATGTGGGCGTGTATTATTGCatgCAGTATATTGAAGCGCCGCTGACCTTTG |
| | | GCGGCGGCACCAAAGTGGAAATTAAA |
| 1310 | VL Ab58 | GATATTGTGatgACCCAGACCCCGCTGAGCCTGAGCGTGACCCCGGGCCAGCCGGCGAGCAT |
| | | TAGCTGCACCAGCAGCCGTAGCCTGCTGCATAGCGATGGCAAAACCTATGTGTATTGGTATG |
| | | TGCAGAAAAGCGGCCAGCCGCCGCAGCTGCTGATTTATGAACTGAGCAACCGTTTTAGCGGC |
| | | GTGCCGGATCGTTTTAGCGGCAGCGGCAGCCGTACCGATTTTACCCTGAAAATTAGCCGTGT |
| | | GGAAGCGGAAGATGTGGGCGTGTATTATTGCatgCAGTATATTGAAGCGCCGCTGACCTTTG |
| | | GCGGCGGCACCAAAGTGGAAATTAAA |
| 1311 | VL Ab59 | GATATTGTGatgACCCAGACCCCGCTGAGCCTGAGCGTGACCCCGGGCCAGCCGGCGAGCAT |
| | | TAGCTGCACCAGCAGCCGTAGCCTGCTGCATAGCGATGGCAAAACCTATGTGTATTGGTATG |
| | | TGCAGAAAAGCGGCCAGCCGCCGCAGCTGCTGATTTATGAACTGAGCAACCGTTTTAGCGGC |
| | | GTGCCGGATCGTTTTAGCGGCAGCGGCAGCCGTACCGATTTTACCCTGAAAATTAGCCGTGT |
| | | GGAAGCGGAAGATGTGGGCGTGTATTATTGCatgCAGTATATTGAAGCGCCGCTGACCTTTG |
| | | GCGGCGGCACCAAAGTGGAAATTAAA |
| 1312 | VL Ab60 | GATATTGTGatgACCCAGACCCCGCTGAGCCTGAGCGTGACCCCGGGCCAGCCGGCGAGCAT |
| | | TAGCTGCACCAGCAGCCGTAGCCTGCTGCATAGCGATGGCAAAACCTATGTGTATTGGTATG |
| | | TGCAGAAAAGCGGCCAGCCGCCGCAGCTGCTGATTTATGAACTGAGCAACCGTTTTAGCGGC |
| | | GTGCCGGATCGTTTTAGCGGCAGCGGCAGCCGTACCGATTTTACCCTGAAAATTAGCCGTGT |
| | | GGAAGCGGAAGATGTGGGCGTGTATTATTGCatgCAGTATATTGAAGCGCCGCTGACCTTTG |
| | | GCGGCGGCACCAAAGTGGAAATTAAA |
| 1313 | VL Ab61 | GATATTGTGatgACCCAGACCCCGCTGAGCCTGAGCGTGACCCCGGGCCAGCCGGCGAGCAT |
| | | TAGCTGCACCAGCAGCCGTAGCCTGCTGCATAGCGATGGCAAAACCTATGTGTATTGGTATG |
| | | TGCAGAAAAGCGGCCAGCCGCCGCAGCTGCTGATTTATGAACTGAGCAACCGTTTTAGCGGC |
| | | GTGCCGGATCGTTTTAGCGGCAGCGGCAGCCGTACCGATTTTACCCTGAAAATTAGCCGTGT |
| | | GGAAGCGGAAGATGTGGGCGTGTATTATTGCatgCAGTATATTGAAGCGCCGCTGACCTTTG |
| | | GCGGCGGCACCAAAGTGGAAATTAAA |
| 1314 | VL Ab62 | GATATTGTGatgACCCAGACCCCGCTGAGCCTGAGCGTGACCCCGGGCCAGCCGGCGAGCAT |
| | | TAGCTGCACCAGCAGCCGTAGCCTGCTGCATAGCGATGGCAAAACCTATGTGTATTGGTATG |
| | | TGCAGAAAAGCGGCCAGCCGCCGCAGCTGCTGATTTATGAACTGAGCAACCGTTTTAGCGGC |
| | | GTGCCGGATCGTTTTAGCGGCAGCGGCAGCCGTACCGATTTTACCCTGAAAATTAGCCGTGT |
| | | GGAAGCGGAAGATGTGGGCGTGTATTATTGCatgCAGTATATTGAAGCGCCGCTGACCTTTG |
| | | GCGGCGGCACCAAAGTGGAAATTAAA |
| 1315 | VL Ab63 | GATATTGTGatgACCCAGACCCCGCTGAGCCTGAGCGTGACCCCGGGCCAGCCGGCGAGCAT |
| | | TAGCTGCACCAGCAGCCGTAGCCTGCTGCATAGCGATGGCAAAACCTATGTGTATTGGTATG |
| | | TGCAGAAAAGCGGCCAGCCGCCGCAGCTGCTGATTTATGAACTGAGCAACCGTTTTAGCGGC |
| | | GTGCCGGATCGTTTTAGCGGCAGCGGCAGCCGTACCGATTTTACCCTGAAAATTAGCCGTGT |
| | | GGAAGCGGAAGATGTGGGCGTGTATTATTGCatgCAGTATATTGAAGCGCCGCTGACCTTTG |
| | | GCGGCGGCACCAAAGTGGAAATTAAA |
| 1316 | VL Ab64 | GATATTGTGatgACCCAGACCCCGCTGAGCCTGAGCGTGACCCCGGGCCAGCCGGCGAGCAT |
| | | TAGCTGCACCAGCAGCCGTAGCCTGCTGCATAGCGATGGCAAAACCTATGTGTATTGGTATG |
| | | TGCAGAAAAGCGGCCAGCCGCCGCAGCTGCTGATTTATGAACTGAGCAACCGTTTTAGCGGC |
| | | GTGCCGGATCGTTTTAGCGGCAGCGGCAGCCGTACCGATTTTACCCTGAAAATTAGCCGTGT |
| | | GGAAGCGGAAGATGTGGGCGTGTATTATTGCatgCAGTATATTGAAGCGCCGCTGACCTTTG |
| | | GCGGCGGCACCAAAGTGGAAATTAAA |
| 1317 | VL Ab65 | GATATTGTGatgACCCAGACCCCGCTGAGCCTGAGCGTGACCCCGGGCCAGCCGGCGAGCAT |
| | | TAGCTGCACCAGCAGCCGTAGCCTGCTGCATAGCGATGGCAAAACCTATGTGTATTGGTATG |
| | | TGCAGAAAAGCGGCCAGCCGCCGCAGCTGCTGATTTATGAACTGAGCAACCGTTTTAGCGGC |
| | | GTGCCGGATCGTTTTAGCGGCAGCGGCAGCCGTACCGATTTTACCCTGAAAATTAGCCGTGT |
| | | GGAAGCGGAAGATGTGGGCGTGTATTATTGCatgCAGTATATTGAAGCGCCGCTGACCTTTG |
| | | GCGGCGGCACCAAAGTGGAAATTAAA |
| 1318 | VL Ab66 | GATATTGTGatgACCCAGACCCCGCTGAGCCTGAGCGTGACCCCGGGCCAGCCGGCGAGCAT |
| | | TAGCTGCACCAGCAGCCGTAGCCTGCTGCATAGCGATGGCAAAACCTATGTGTATTGGTATG |
| | | TGCAGAAAAGCGGCCAGCCGCCGCAGCTGCTGATTTATGAACTGAGCAACCGTTTTAGCGGC |
| | | GTGCCGGATCGTTTTAGCGGCAGCGGCAGCCGTACCGATTTTACCCTGAAAATTAGCCGTGT |
| | | GGAAGCGGAAGATGTGGGCGTGTATTATTGCatgCAGTATATTGAAGCGCCGCTGACCTTTG |
| | | GCGGCGGCACCAAAGTGGAAATTAAA |
| 1319 | VL Ab67 | GATATTGTGatgACCCAGACCCCGCTGAGCCTGAGCGTGACCCCGGGCCAGCCGGCGAGCAT |
| | | TAGCTGCACCAGCAGCCGTAGCCTGCTGCATAGCGATGGCAAAACCTATGTGTATTGGTATG |
| | | TGCAGAAAAGCGGCCAGCCGCCGCAGCTGCTGATTTATGAACTGAGCAACCGTTTTAGCGGC |
| | | GTGCCGGATCGTTTTAGCGGCAGCGGCAGCCGTACCGATTTTACCCTGAAAATTAGCCGTGT |
| | | GGAAGCGGAAGATGTGGGCGTGTATTATTGCatgCAGTATATTGAAGCGCCGCTGACCTTTG |
| | | GCGGCGGCACCAAAGTGGAAATTAAA |
| 1320 | VL Ab68 | GATATTGTGatgACCCAGACCCCGCTGAGCCTGAGCGTGACCCCGGGCCAGCCGGCGAGCAT |
| | | TAGCTGCACCAGCAGCCGTAGCCTGCTGCATAGCGATGGCAAAACCTATGTGTATTGGTATG |
| | | TGCAGAAAAGCGGCCAGCCGCCGCAGCTGCTGATTTATGAACTGAGCAACCGTTTTAGCGGC |
| | | GTGCCGGATCGTTTTAGCGGCAGCGGCAGCCGTACCGATTTTACCCTGAAAATTAGCCGTGT |
| | | GGAAGCGGAAGATGTGGGCGTGTATTATTGCatgCAGTATATTGAAGCGCCGCTGACCTTTG |
| | | GCGGCGGCACCAAAGTGGAAATTAAA |
| 1321 | VL Ab69 | GATATTGTGatgACCCAGACCCCGCTGAGCCTGAGCGTGACCCCGGGCCAGCCGGCGAGCATT |
| | | AGCTGCACCAGCAGCCGTAGCCTGCTGCATAGCGATGGCAAAACCTATGTGTATTGGTATGTG |
| | | CAGAAAAGCGGCCAGCCGCCGCAGCTGCTGATTTATGAACTGAGCAACCGTTTTAGCGGCGTG |
| | | CCGGATCGTTTTAGCGGCAGCGGCAGCCGTACCGATTTTACCCTGAAAATTAGCCGTGTGGAA |
| | | GCGGAAGATGTGGGCGTGTATTATTGCatgCAGTATATTGAAGCGCCGCTGACCTTTGGCGGC |
| | | GGCACCAAAGTGGAAATTAAA |
| 1322 | VL Ab70 | GATATTGTGatgACCCAGACCCCGCTGAGCCTGAGCGTGACCCCGGGCCAGCCGGCGAGCATT |
| | | AGCTGCAAAAGCAGCCGTAGCCTGCTGCATAGCGATGGCAAAACCTATGTGTATTGGTATGTG |
| | | CAGAAAAGCGGCCAGCCGCCGCAGCTGCTGATTTATGAACTGAGCAACCGTTTTAGCGGCGTG |
| | | CCGGATCGTTTTAGCGGCAGCGGCAGCCGTACCGATTTTACCCTGAAAATTAGCCGTGTGGAA |
| | | GCGGAAGATGTGGGCGTGTATTATTGCatgCAGTATATTGAAGCGCCGCTGACCTTTGGCGGC |
| | | GGCACCAAAGTGGAAATTAAA |
| 1323 | VL Ab71 | GATATTGTGatgACCCAGACCCCGCTGAGCCTGAGCGTGACCCCGGGCCAGCCGGCGAGCATT |
| | | AGCTGCAAAAGCAGCCGTAGCCTGCTGCATAGCGATGGCAAAACCTATGTGTATTGGTATGTG |
| | | CAGAAAAGCGGCCAGCCGCCGCAGCTGCTGATTTATGAACTGAGCAACCGTTTTAGCGGCGTG |
| | | CCGGATCGTTTTAGCGGCAGCGGCAGCCGTACCGATTTTACCCTGAAAATTAGCCGTGTGGAA |
| | | GCGGAAGATGTGGGCGTGTATTATTGCatgCAGTATATTGAAGCGCCGCTGACCTTTGGCGGC |
| | | GGCACCAAAGTGGAAATTAAA |
| 1324 | VL Ab72 | GATATTGTGatgACCCAGACCCCGCTGAGCCTGAGCGTGACCCCGGGCCAGCCGGCGAGCATT |
| | | AGCTGCAAAAGCAGCCGTAGCCTGCTGCATAGCGATGGCAAAACCTATGTGTATTGGTATGTG |
| | | CAGAAAAGCGGCCAGCCGCCGCAGCTGCTGATTTATGAACTGAGCAACCGTTTTAGCGGCGTG |
| | | CCGGATCGTTTTAGCGGCAGCGGCAGCCGTACCGATTTTACCCTGAAAATTAGCCGTGTGGAA |
| | | GCGGAAGATGTGGGCGTGTATTATTGCatgCAGTATATTGAAGCGCCGCTGACCTTTGGCGGC |
| | | GGCACCAAAGTGGAAATTAAA |
| 1325 | VL Ab73 | GATATTGTGatgACCCAGACCCCGCTGAGCCTGAGCGTGACCCCGGGCCAGCCGGCGAGCATT |
| | | AGCTGCAAAAGCAGCCGTAGCCTGCTGCATAGCGATGGCAAAACCTATGTGTATTGGTATGTG |
| | | CAGAAAAGCGGCCAGCCGCCGCAGCTGCTGATTTATGAACTGAGCAACCGTTTTAGCGGCGTG |
| | | CCGGATCGTTTTAGCGGCAGCGGCAGCCGTACCGATTTTACCCTGAAAATTAGCCGTGTGGAA |
| | | GCGGAAGATGTGGGCGTGTATTATTGCatgCAGTATATTGAAGCGCCGCTGACCTTTGGCGGC |
| | | GGCACCAAAGTGGAAATTAAA |
| 1326 | VL Ab74 | GATATTGTGatgACCCAGACCCCGCTGAGCCTGAGCGTGACCCCGGGCCAGCCGGCGAGCATT |
| | | AGCTGCAAAAGCAGCCGTAGCCTGCTGCATAGCGATGGCAAAACCTATGTGTATTGGTATGTG |
| | | CAGAAAAGCGGCCAGCCGCCGCAGCTGCTGATTTATGAACTGAGCAACCGTTTTAGCGGCGTG |
| | | CCGGATCGTTTTAGCGGCAGCGGCAGCCGTACCGATTTTACCCTGAAAATTAGCCGTGTGGAA |
| | | GCGGAAGATGTGGGCGTGTATTATTGCatgCAGTATATTGAAGCGCCGCTGACCTTTGGCGGC |
| | | GGCACCAAAGTGGAAATTAAA |
| 1327 | VL Ab75 | GATATTGTGatgACCCAGACCCCGCTGAGCCTGAGCGTGACCCCGGGCCAGCCGGCGAGCATT |
| | | AGCTGCAAAAGCAGCCGTAGCCTGCTGCATAGCGATGGCAAAACCTATGTGTATTGGTATGTG |
| | | CAGAAAAGCGGCCAGCCGCCGCAGCTGCTGATTTATGAACTGAGCAACCGTTTTAGCGGCGTG |
| | | CCGGATCGTTTTAGCGGCAGCGGCAGCCGTACCGATTTTACCCTGAAAATTAGCCGTGTGGAA |
| | | GCGGAAGATGTGGGCGTGTATTATTGCatgCAGTATATTGAAGCGCCGCTGACCTTTGGCGGC |
| | | GGCACCAAAGTGGAAATTAAA |
| 1328 | VL Ab76 | GATATTGTGatgACCCAGACCCCGCTGAGCCTGAGCGTGACCCCGGGCCAGCCGGCGAGCATT |
| | | AGCTGCAAAAGCAGCCGTAGCCTGCTGCATAGCGATGGCAAAACCTATGTGTATTGGTATGTG |
| | | CAGAAAAGCGGCCAGCCGCCGCAGCTGCTGATTTATGAACTGAGCAACCGTTTTAGCGGCGTG |
| | | CCGGATCGTTTTAGCGGCAGCGGCAGCCGTACCGATTTTACCCTGAAAATTAGCCGTGTGGAA |
| | | GCGGAAGATGTGGGCGTGTATTATTGCatgCAGTATATTGAAGCGCCGCTGACCTTTGGCGGC |
| | | GGCACCAAAGTGGAAATTAAA |
| 1329 | VL Ab77 | GATATTGTGatgACCCAGACCCCGCTGAGCCTGAGCGTGACCCCGGGCCAGCCGGCGAGCATT |
| | | AGCTGCAAAAGCAGCCGTAGCCTGCTGCATAGCGATGGCAAAACCTATGTGTATTGGTATGTG |
| | | CAGAAAAGCGGCCAGCCGCCGCAGCTGCTGATTTATGAACTGAGCAACCGTTTTAGCGGCGTG |
| | | CCGGATCGTTTTAGCGGCAGCGGCAGCCGTACCGATTTTACCCTGAAAATTAGCCGTGTGGAA |
| | | GCGGAAGATGTGGGCGTGTATTATTGCatgCAGTATATTGAAGCGCCGCTGACCTTTGGCGGC |
| | | GGCACCAAAGTGGAAATTAAA |
| 1330 | VL Ab78 | GATATTGTGatgACCCAGACCCCGCTGAGCCTGAGCGTGACCCCGGGCCAGCCGGCGAGCATT |
| | | AGCTGCAAAAGCAGCCGTAGCCTGCTGCATAGCGATGGCAAAACCTATGTGTATTGGTATGTG |
| | | CAGAAAAGCGGCCAGCCGCCGCAGCTGCTGATTTATGAACTGAGCAACCGTTTTAGCGGCGTG |
| | | CCGGATCGTTTTAGCGGCAGCGGCAGCCGTACCGATTTTACCCTGAAAATTAGCCGTGTGGAA |
| | | GCGGAAGATGTGGGCGTGTATTATTGCatgCAGTATATTGAAGCGCCGCTGACCTTTGGCGGC |
| | | GGCACCAAAGTGGAAATTAAA |
| 1331 | VL Ab79 | GATATTGTGatgACCCAGACCCCGCTGAGCCTGAGCGTGACCCCGGGCCAGCCGGCGAGCATT |
| | | AGCTGCAAAAGCAGCCGTAGCCTGCTGCATAGCGATGGCAAAACCTATGTGTATTGGTATGTG |
| | | CAGAAAAGCGGCCAGCCGCCGCAGCTGCTGATTTATGAACTGAGCAACCGTTTTAGCGGCGTG |
| | | CCGGATCGTTTTAGCGGCAGCGGCAGCCGTACCGATTTTACCCTGAAAATTAGCCGTGTGGAA |
| | | GCGGAAGATGTGGGCGTGTATTATTGCatgCAGTATATTGAAGCGCCGCTGACCTTTGGCGGC |
| | | GGCACCAAAGTGGAAATTAAA |
| 1332 | VL Ab80 | GATATTGTGatgACCCAGACCCCGCTGAGCCTGAGCGTGACCCCGGGCCAGCCGGCGAGCATT |
| | | AGCTGCAAAAGCAGCCGTAGCCTGCTGCATAGCGATGGCAAAACCTATGTGTATTGGTATGTG |
| | | CAGAAAAGCGGCCAGCCGCCGCAGCTGCTGATTTATGAACTGAGCAACCGTTTTAGCGGCGTG |
| | | CCGGATCGTTTTAGCGGCAGCGGCAGCCGTACCGATTTTACCCTGAAAATTAGCCGTGTGGAA |
| | | GCGGAAGATGTGGGCGTGTATTATTGCatgCAGTATATTGAAGCGCCGCTGACCTTTGGCGGC |
| | | GGCACCAAAGTGGAAATTAAA |
| 1333 | VL Ab81 | GATATTGTGatgACCCAGACCCCGCTGAGCCTGAGCGTGACCCCGGGCCAGCCGGCGAGCATT |
| | | AGCTGCAAAAGCAGCCGTAGCCTGCTGCATAGCGATGGCAAAACCTATGTGTATTGGTATGTG |
| | | CAGAAAAGCGGCCAGCCGCCGCAGCTGCTGATTTATGAACTGAGCAACCGTTTTAGCGGCGTG |
| | | CCGGATCGTTTTAGCGGCAGCGGCAGCCGTACCGATTTTACCCTGAAAATTAGCCGTGTGGAA |
| | | GCGGAAGATGTGGGCGTGTATTATTGCatgCAGTATATTGAAGCGCCGCTGACCTTTGGCGGC |
| | | GGCACCAAAGTGGAAATTAAA |
| 1334 | VL Ab82 | GATATTGTGatgACCCAGACCCCGCTGAGCCTGAGCGTGACCCCGGGCCAGCCGGCGAGCATT |
| | | AGCTGCAAAAGCAGCCGTAGCCTGCTGCATAGCGATGGCAAAACCTATGTGTATTGGTATGTG |
| | | CAGAAAAGCGGCCAGCCGCCGCAGCTGCTGATTTATGAACTGAGCAACCGTTTTAGCGGCGTG |
| | | CCGGATCGTTTTAGCGGCAGCGGCAGCCGTACCGATTTTACCCTGAAAATTAGCCGTGTGGAA |
| | | GCGGAAGATGTGGGCGTGTATTATTGCatgCAGTATATTGAAGCGCCGCTGACCTTTGGCGGC |
| | | GGCACCAAAGTGGAAATTAAA |
| 1335 | VL Ab83 | GATATTGTGatgACCCAGACCCCGCTGAGCCTGAGCGTGACCCCGGGCCAGCCGGCGAGCATT |
| | | AGCTGCAAAAGCAGCCGTAGCCTGCTGCATAGCGATGGCAAAACCTATGTGTATTGGTATGTG |
| | | CAGAAAAGCGGCCAGCCGCCGCAGCTGCTGATTTATGAACTGAGCAACCGTTTTAGCGGCGTG |
| | | CCGGATCGTTTTAGCGGCAGCGGCAGCCGTACCGATTTTACCCTGAAAATTAGCCGTGTGGAA |
| | | GCGGAAGATGTGGGCGTGTATTATTGCatgCAGTATATTGAAGCGCCGCTGACCTTTGGCGGC |
| | | GGCACCAAAGTGGAAATTAAA |
| 1336 | VL Ab84 | GATATTGTGatgACCCAGACCCCGCTGAGCCTGAGCGTGACCCCGGGCCAGCCGGCGAGCATT |
| | | AGCTGCAAAAGCAGCCGTAGCCTGCTGCATAGCGATGGCAAAACCTATGTGTATTGGTATGTG |
| | | CAGAAAAGCGGCCAGCCGCCGCAGCTGCTGATTTATGAACTGAGCAACCGTTTTAGCGGCGTG |
| | | CCGGATCGTTTTAGCGGCAGCGGCAGCCGTACCGATTTTACCCTGAAAATTAGCCGTGTGGAA |
| | | GCGGAAGATGTGGGCGTGTATTATTGCatgCAGTATATTGAAGCGCCGCTGACCTTTGGCGGC |
| | | GGCACCAAAGTGGAAATTAAA |
| 1337 | VL Ab85 | GATATTGTGatgACCCAGACCCCGCTGAGCCTGAGCGTGACCCCGGGCCAGCCGGCGAGCATT |
| | | AGCTGCAAAAGCAGCCGTAGCCTGCTGCATAGCGATGGCAAAACCTATGTGTATTGGTATGTG |
| | | CAGAAAAGCGGCCAGCCGCCGCAGCTGCTGATTTATGAACTGAGCAACCGTTTTAGCGGCGTG |
| | | CCGGATCGTTTTAGCGGCAGCGGCAGCCGTACCGATTTTACCCTGAAAATTAGCCGTGTGGAA |
| | | GCGGAAGATGTGGGCGTGTATTATTGCatgCAGTATATTGAAGCGCCGCTGACCTTTGGCGGC |
| | | GGCACCAAAGTGGAAATTAAA |
| 1338 | VL Ab86 | GATATTGTGatgACCCAGACCCCGCTGAGCCTGAGCGTGACCCCGGGCCAGCCGGCGAGCATT |
| | | AGCTGCAAAAGCAGCCGTAGCCTGCTGTGGAGCGATGGCAAAACCTATGTGTATTGGTATGTG |
| | | CAGAAAAGCGGCCAGCCGCCGCAGCTGCTGATTTATGAACTGAGCAACCGTTTTAGCGGCGTG |
| | | CCGGATCGTTTTAGCGGCAGCGGCAGCCGTACCGATTTTACCCTGAAAATTAGCCGTGTGGAA |
| | | GCGGAAGATGTGGGCGTGTATTATTGCatgCAGTATATTGAAGCGCCGCTGACCTTTGGCGGC |
| | | GGCACCAAAGTGGAAATTAAA |
| 1339 | VL Ab87 | GATATTGTGatgACCCAGACCCCGCTGAGCCTGAGCGTGACCCCGGGCCAGCCGGCGAGCATT |
| | | AGCTGCAAAAGCAGCCGTAGCCTGCTGCATAGCGATGGCAAAACCTATGTGTATTGGTATGTG |
| | | CAGAAAAGCGGCCAGCCGCCGCAGCTGCTGATTTATGAACTGAGCAACCGTTTTAGCGGCGTG |
| | | CCGGATCGTTTTAGCGGCAGCGGCAGCCGTACCGATTTTACCCTGAAAATTAGCCGTGTGGAA |
| | | GCGGAAGATGTGGGCGTGTATTATTGCatgCAGTATGTGGAAGCGCCGCTGACCTTTGGCGGC |
| | | GGCACCAAAGTGGAAATTAAA |
| 1340 | VL Ab88 | GATATTGTGatgACCCAGACCCCGCTGAGCCTGAGCGTGACCCCGGGCCAGCCGGCGAGCATT |
| | | AGCTGCAAAAGCAGCCGTAGCCTGCTGCATAGCGATGGCAAAACCTATCTGTATTGGTATGTG |
| | | CAGAAAAGCGGCCAGCCGCCGCAGCTGCTGATTTATGAACTGAGCAACCGTTTTAGCGGCGTG |
| | | CCGGATCGTTTTAGCGGCAGCGGCAGCCGTACCGATTTTACCCTGAAAATTAGCCGTGTGGAA |
| | | GCGGAAGATGTGGGCGTGTATTATTGCatgCAGTATATTGAAGCGCCGCTGACCTTTGGCGGC |
| | | GGCACCAAAGTGGAAATTAAA |
| 1341 | VL Ab89 | GATATTGTGatgACCCAGACCCCGCTGAGCCTGAGCGTGACCCCGGGCCAGCCGGCGAGCATT |
| | | AGCTGCCGTAGCAGCCGTAGCCTGCTGCATAGCGATGGCAAAACCTATGTGTATTGGTATGTG |
| | | CAGAAAAGCGGCCAGCCGCCGCAGCTGCTGATTTATGAACTGAGCAACCGTTTTAGCGGCGTG |
| | | CCGGATCGTTTTAGCGGCAGCGGCAGCCGTACCGATTTTACCCTGAAAATTAGCCGTGTGGAA |
| | | GCGGAAGATGTGGGCGTGTATTATTGCatgCAGTATATTGAAGTGCCGCTGACCTTTGGCGGC |
| | | GGCACCAAAGTGGAAATTAAA |
| 1342 | VL Ab90 | GATATTGTGatgACCCAGACCCCGCTGAGCCTGAGCGTGACCCCGGGCCAGCCGGCGAGCATT |
| | | AGCTGCACCAGCAGCCGTAGCCTGCTGCATAGCGATGGCAAAACCTATGTGTATTGGTATGTG |
| | | CAGAAAAGCGGCCAGCCGCCGCAGCTGCTGATTTATGAACTGAGCAACCGTTTTAGCGGCGTG |
| | | CCGGATCGTTTTAGCGGCAGCGGCAGCCGTACCGATTTTACCCTGAAAATTAGCCGTGTGGAA |
| | | GCGGAAGATGTGGGCGTGTATTATTGCatgCAGTATGTGGAAGTGCCGCTGACCTTTGGCGGC |
| | | GGCACCAAAGTGGAAATTAAA |
| 1343 | VL Ab91 | GATATTGTGatgACCCAGACCCCGCTGAGCCTGAGCGTGACCCCGGGCCAGCCGGCGAGCATT |
| | | AGCTGCCGTAGCAGCCGTAGCCTGCTGTGGAGCGATGGCAAAACCTATGTGTATTGGTATGTG |
| | | CAGAAAAGCGGCCAGCCGCCGCAGCTGCTGATTTATGAACTGAGCAACCGTTTTAGCGGCGTG |
| | | CCGGATCGTTTTAGCGGCAGCGGCAGCCGTACCGATTTTACCCTGAAAATTAGCCGTGTGGAA |
| | | GCGGAAGATGTGGGCGTGTATTATTGCatgCAGTATATTGAAGCGCCGCTGACCTTTGGCGGC |
| | | GGCACCAAAGTGGAAATTAAA |
| 1344 | VL Ab92 | GATATTGTGatgACCCAGACCCCGCTGAGCCTGAGCGTGACCCCGGGCCAGCCGGCGAGCATT |
| | | AGCTGCCGTAGCAGCCGTAGCCTGCTGCATAGCGATGGCAAAACCTATGTGTATTGGTATGTG |
| | | CAGAAAAGCGGCCAGCCGCCGCAGCTGCTGATTTATGAACTGAGCAACCGTTTTAGCGGCGTG |
| | | CCGGATCGTTTTAGCGGCAGCGGCAGCCGTACCGATTTTACCCTGAAAATTAGCCGTGTGGAA |
| | | GCGGAAGATGTGGGCGTGTATTATTGCatgCAGTATGTGGAAGCGCCGCTGACCTTTGGCGGC |
| | | GGCACCAAAGTGGAAATTAAA |
| 1345 | VL Ab93 | GATATTGTGatgACCCAGACCCCGCTGAGCCTGAGCGTGACCCCGGGCCAGCCGGCGAGCATT |
| | | AGCTGCAAAAGCAGCCGTAGCCTGCTGCATAGCGATGGCAAAACCTATCTGTATTGGTATGTG |
| | | CAGAAAAGCGGCCAGCCGCCGCAGCTGCTGATTTATGAACTGAGCAACCGTTTTAGCGGCGTG |
| | | CCGGATCGTTTTAGCGGCAGCGGCAGCCGTACCGATTTTACCCTGAAAATTAGCCGTGTGGAA |
| | | GCGGAAGATGTGGGCGTGTATTATTGCatgCAGTATATTGAAGCGCCGCTGACCTTTGGCGGC |
| | | GGCACCAAAGTGGAAATTAAA |
| 1346 | VL Ab94 | GATATTGTGatgACCCAGACCCCGCTGAGCCTGAGCGTGACCCCGGGCCAGCCGGCGAGCATT |
| | | AGCTGCCGTAGCAGCCGTAGCCTGCTGCATAGCGATGGCAAAACCTATGTGTATTGGTATGTG |
| | | CAGAAAAGCGGCCAGCCGCCGCAGCTGCTGATTTATGAACTGAGCAACCGTTTTAGCGGCGTG |
| | | CCGGATCGTTTTAGCGGCAGCGGCAGCCGTACCGATTTTACCCTGAAAATTAGCCGTGTGGAA |
| | | GCGGAAGATGTGGGCGTGTATTATTGCatgCAGTATATTGAAGCGCCGCTGACCTTTGGCGGC |
| | | GGCACCAAAGTGGAAATTAAA |
| 1347 | VL Ab95 | GATATTGTGatgACCCAGACCCCGCTGAGCCTGAGCGTGACCCCGGGCCAGCCGGCGAGCATT |
| | | AGCTGCACCAGCAGCCGTAGCCTGCTGCATAGCGATGGCAAAACCTATGTGTATTGGTATGTG |
| | | CAGAAAAGCGGCCAGCCGCCGCAGCTGCTGATTTATGAACTGAGCAACCGTTTTAGCGGCGTG |
| | | CCGGATCGTTTTAGCGGCAGCGGCAGCCGTACCGATTTTACCCTGAAAATTAGCCGTGTGGAA |
| | | GCGGAAGATGTGGGCGTGTATTATTGCatgCAGTATATTGAAGCGCCGCTGACCTTTGGCGGC |
| | | GGCACCAAAGTGGAAATTAAA |
| 1348 | VL Ab96 | GATATTGTGatgACCCAGACCCCGCTGAGCCTGAGCGTGACCCCGGGCCAGCCGGCGAGCATT |
| | | AGCTGCAAAAGCAGCCGTAGCCTGCTGCATAGCGATGGCAAAACCTATGTGTATTGGTATGTG |
| | | CAGAAAAGCGGCCAGCCGCCGCAGCTGCTGATTTATGAACTGAGCAACCGTTTTAGCGGCGTG |
| | | CCGGATCGTTTTAGCGGCAGCGGCAGCCGTACCGATTTTACCCTGAAAATTAGCCGTGTGGAA |
| | | GCGGAAGATGTGGGCGTGTATTATTGCatgCAGTATATTGAAGCGCCGCTGACCTTTGGCGGC |
| | | GGCACCAAAGTGGAAATTAAA |
| 1349 | VL Ab97 | GATATTGTGatgACCCAGACCCCGCTGAGCCTGAGCGTGACCCCGGGCCAGCCGGCGAGCATT |
| | | AGCTGCAAAAGCAGCCGTAGCCTGCTGCATAGCGATGGCAAAACCTATGTGTATTGGTATGTG |
| | | CAGAAAAGCGGCCAGCCGCCGCAGCTGCTGATTTATGAACTGAGCAACCGTTTTAGCGGCGTG |
| | | CCGGATCGTTTTAGCGGCAGCGGCAGCCGTACCGATTTTACCCTGAAAATTAGCCGTGTGGAA |
| | | GCGGAAGATGTGGGCGTGTATTATTGCatgCAGTATGTGGAAGCGCCGCTGACCTTTGGCGGC |
| | | GGCACCAAAGTGGAAATTAAA |
| 1350 | VL Ab98 | GATATTGTGatgACCCAGACCCCGCTGAGCCTGAGCGTGACCCCGGGCCAGCCGGCGAGCATT |
| | | AGCTGCACCAGCAGCCGTAGCCTGCTGCATAGCGATGGCAAAACCTATGTGTATTGGTATGTG |
| | | CAGAAAAGCGGCCAGCCGCCGCAGCTGCTGATTTATGAACTGAGCAACCGTTTTAGCGGCGTG |
| | | CCGGATCGTTTTAGCGGCAGCGGCAGCCGTACCGATTTTACCCTGAAAATTAGCCGTGTGGAA |
| | | GCGGAAGATGTGGGCGTGTATTATTGCatgCAGTATGTGGAAGTGCCGCTGACCTTTGGCGGC |
| | | GGCACCAAAGTGGAAATTAAA |
| 1351 | VL Ab99 | GATATTGTGatgACCCAGACCCCGCTGAGCCTGAGCGTGACCCCGGGCCAGCCGGCGAGCATT |
| | | AGCTGCCGTAGCAGCCGTAGCCTGCTGTGGAGCGATGGCAAAACCTATGTGTATTGGTATGTG |
| | | CAGAAAAGCGGCCAGCCGCCGCAGCTGCTGATTTATGAACTGAGCAACCGTTTTAGCGGCGTG |
| | | CCGGATCGTTTTAGCGGCAGCGGCAGCCGTACCGATTTTACCCTGAAAATTAGCCGTGTGGAA |
| | | GCGGAAGATGTGGGCGTGTATTATTGCatgCAGTATATTGAAGCGCCGCTGACCTTTGGCGGC |
| | | GGCACCAAAGTGGAAATTAAA |
| 13$$ | VL Ab100 | GATATTGTGatgACCCAGACCCCGCTGAGCCTGAGCGTGACCCCGGGCCAGCCGGCGAGCATT |
| | | AGCTGCAAAAGCAGCCGTAGCCTGCTGTGGAGCGATGGCAAAACCTATGTGTATTGGTATGTG |
| | | CAGAAAAGCGGCCAGCCGCCGCAGCTGCTGATTTATGAACTGAGCAACCGTTTTAGCGGCGTG |
| | | CCGGATCGTTTTAGCGGCAGCGGCAGCCGTACCGATTTTACCCTGAAAATTAGCCGTGTGGAA |
| | | GCGGAAGATGTGGGCGTGTATTATTGCatgCAGTATGTGGAAGCGCCGCTGACCTTTGGCGGC |
| | | GGCACCAAAGTGGAAATTAAA |
| 1353 | VL Ab101 | GATATTGTGatgACCCAGACCCCGCTGAGCCTGAGCGTGACCCCGGGCCAGCCGGCGAGCATT |
| | | AGCTGCCGTAGCAGCCGTAGCCTGCTGCATAGCGATGGCAAAACCTATGTGTATTGGTATGTG |
| | | CAGAAAAGCGGCCAGCCGCCGCAGCTGCTGATTTATGAACTGAGCAACCGTTTTAGCGGCGTG |
| | | CCGGATCGTTTTAGCGGCAGCGGCAGCCGTACCGATTTTACCCTGAAAATTAGCCGTGTGGAA |
| | | GCGGAAGATGTGGGCGTGTATTATTGCatgCAGTATATTGAAGCGCCGCTGACCTTTGGCGGC |
| | | GGCACCAAAGTGGAAATTAAA |
| 1354 | VL Ab102 | GATATTGTGatgACCCAGACCCCGCTGAGCCTGAGCGTGACCCCGGGCCAGCCGGCGAGCATT |
| | | AGCTGCACCAGCAGCCGTAGCCTGCTGCATAGCGATGGCAAAACCTATGTGTATTGGTATGTG |
| | | CAGAAAAGCGGCCAGCCGCCGCAGCTGCTGATTTATGAACTGAGCAACCGTTTTAGCGGCGTG |
| | | CCGGATCGTTTTAGCGGCAGCGGCAGCCGTACCGATTTTACCCTGAAAATTAGCCGTGTGGAA |
| | | GCGGAAGATGTGGGCGTGTATTATTGCatgCAGTATATTGAAGCGCCGCTGACCTTTGGCGGC |
| | | GGCACCAAAGTGGAAATTAAA |
| 1355 | VL Ab103 | GATATTGTGatgACCCAGACCCCGCTGAGCCTGAGCGTGACCCCGGGCCAGCCGGCGAGCATT |
| | | AGCTGCAAAAGCAGCCGTAGCCTGCTGCATAGCGATGGCAAAACCTATGTGTATTGGTATGTG |
| | | CAGAAAAGCGGCCAGCCGCCGCAGCTGCTGATTTATGAACTGAGCAACCGTTTTAGCGGCGTG |
| | | CCGGATCGTTTTAGCGGCAGCGGCAGCCGTACCGATTTTACCCTGAAAATTAGCCGTGTGGAA |
| | | GCGGAAGATGTGGGCGTGTATTATTGCatgCAGTATATTGAAGCGCCGCTGACCTTTGGCGGC |
| | | GGCACCAAAGTGGAAATTAAA |
| 1356 | VL Ab104 | GATATTGTGatgACCCAGACCCCGCTGAGCCTGAGCGTGACCCCGGGCCAGCCGGCGAGCATT |
| | | AGCTGCAAAAGCAGCCGTAGCCTGCTGCATAGCGATGGCAAAACCTATGTGTATTGGTATGTG |
| | | CAGAAAAGCGGCCAGCCGCCGCAGCTGCTGATTTATGAACTGAGCAACCGTTTTAGCGGCGTG |
| | | CCGGATCGTTTTAGCGGCAGCGGCAGCCGTACCGATTTTACCCTGAAAATTAGCCGTGTGGAA |
| | | GCGGAAGATGTGGGCGTGTATTATTGCatgCAGTATGTGGAAGCGCCGCTGACCTTTGGCGGC |
| | | GGCACCAAAGTGGAAATTAAA |
| 1357 | VL Ab105 | GATATTGTGatgACCCAGACCCCGCTGAGCCTGAGCGTGACCCCGGGCCAGCCGGCGAGCATT |
| | | AGCTGCACCAGCAGCCGTAGCCTGCTGCATAGCGATGGCAAAACCTATGTGTATTGGTATGTG |
| | | CAGAAAAGCGGCCAGCCGCCGCAGCTGCTGATTTATGAACTGAGCAACCGTTTTAGCGGCGTG |
| | | CCGGATCGTTTTAGCGGCAGCGGCAGCCGTACCGATTTTACCCTGAAAATTAGCCGTGTGGAA |
| | | GCGGAAGATGTGGGCGTGTATTATTGCatgCAGTATGTGGAAGTGCCGCTGACCTTTGGCGGC |
| | | GGCACCAAAGTGGAAATTAAA |
| 1358 | VL Ab106 | GATATTGTGatgACCCAGACCCCGCTGAGCCTGAGCGTGACCCCGGGCCAGCCGGCGAGCATT |
| | | AGCTGCCGTAGCAGCCGTAGCCTGCTGTGGAGCGATGGCAAAACCTATGTGTATTGGTATGTG |
| | | CAGAAAAGCGGCCAGCCGCCGCAGCTGCTGATTTATGAACTGAGCAACCGTTTTAGCGGCGTG |
| | | CCGGATCGTTTTAGCGGCAGCGGCAGCCGTACCGATTTTACCCTGAAAATTAGCCGTGTGGAA |
| | | GCGGAAGATGTGGGCGTGTATTATTGCatgCAGTATATTGAAGCGCCGCTGACCTTTGGCGGC |
| | | GGCACCAAAGTGGAAATTAAA |
| 1359 | VL Ab107 | GATATTGTGatgACCCAGACCCCGCTGAGCCTGAGCGTGACCCCGGGCCAGCCGGCGAGCATT |
| | | AGCTGCAAAAGCAGCCGTAGCCTGCTGTGGAGCGATGGCAAAACCTATGTGTATTGGTATGTG |
| | | CAGAAAAGCGGCCAGCCGCCGCAGCTGCTGATTTATGAACTGAGCAACCGTTTTAGCGGCGTG |
| | | CCGGATCGTTTTAGCGGCAGCGGCAGCCGTACCGATTTTACCCTGAAAATTAGCCGTGTGGAA |
| | | GCGGAAGATGTGGGCGTGTATTATTGCatgCAGTATGTGGAAGCGCCGCTGACCTTTGGCGGC |
| | | GGCACCAAAGTGGAAATTAAA |
| 1360 | HC Ab16 | GAAGTGCAGCTGCTGGAAAGCGGCGGCGGCGTGGTGCAGCCGGGCCGTAGCCTGCGTCTGAGC |
| | | TGCGCGGCGAGCGGCTTTACCTTTAGCAGCTATGCGatgCATTGGGTGCGTCAGGCGCCGGGC |
| | | AAAGGCCTGGAATGGGTGGCGGTGATTAGCTATGATGGCAGCAACAAATATTATGCGGATAGC |
| | | GTGAAAGGCCGTTTTACCATTAGCCGTGATAACAGCAAAAACACCCTGAGCCTGCAGatgAAC |
| | | AGCCTGCGTGTGGAAGATACCGCGATTTATTATTGCGTGCGTGGCGCGGGCCGTGGCTATACC |
| | | CGTGGCCCGGATGGCTTTGATATTTGGGGCCAGGGCACCatgGTGACCGTGAGCAGCAAGGGA |
| | | CCCTCGGTGTTCCCTCTCGCCCCCTCATCGAGGAGCACGTCCGAATCGACTGCGGCGCTGGGA |
| | | TGTCTCGTGAAGGACTACTTCCCCGAGCCCGTGACCGTGTCATGGAACTCAGGCGCATTGACC |
| | | TCGGGAGTGCACACGTTCCCGGCAGTGTTGCAGTCGTCGGGCCTTTACTCGCTGTCGTCCGTG |
| | | GTCACGGTGCCTTCGTCGAATTTCGGGACGCAGACTTACACATGTAATGTGGATCACAAACCG |
| | | TCCAATACCAAGGTCGATAAGACGGTCGAAAGGAAATGCTGCGTGGAATGTCCTCCCTGCCCA |
| | | GCACCGCCAGTCGCGGGTCCCAGCGTCTTTTTGTTCCCACCGAAGCCCAAGGACACACTGATG |
| | | ATCAGCCGTACGCCGGAGGTAACATGCGTAGTGGTAGATGTCTCGCATGAGGACCCTGAAGTG |
| | | CAGTTCAATTGGTATGTAGACGGCGTGGAGGTGCACAACGCCAAGACCAAGCCACGAGAAGAA |
| | | CAGTTCAACTCGACTTTTAGAGTGGTATCCGTCCTGACCGTCGTGCACCAGGACTGGCTCAAT |
| | | GGAAAGGAGTACAAATGCAAGGTATCCAACAAGGGGTTGCCAGCTCCAATCGAAAAGACCATC |
| | | TCAAAGACAAAGGGGCAGCCCAGAGAGCCCCAAGTGTATACGCTTCCACCCTCAAGGGAGGAG |
| | | ATGACAAAGAATCAGGTATCACTCACATGTTTGGTGAAAGGGTTTTATCCGAGCGATATTGCG |
| | | GTCGAGTGGGAAAGCAACGGTCAACCGGAGAACAACTATAAGACGACTCCCCCTATGCTGGAC |
| | | AGCGACGGGTCGTTCTTTCTGTATTCCAAACTCACGGTGGACAAATCGAGGTGGCAGCAAGGA |
| | | AACGTATTCTCATGCTCAGTAATGCACGAGGCCCTCCATAATCATTACACGCAGAAATCATTA |
| | | AGCTTATCGCCGGGT |
| 1361 | HC Ab17 | GAAGTGCAGCTGCTGGAAAGCGGCGGCGGCGTGGTGCAGCCGGGCCGTAGCCTGCGTCTGAGC |
| | | TGCGCGGCGAGCGGCTTTACCTTTAGCAGCTATGCGatgCATTGGGTGCGTCAGGCGCCGGGC |
| | | AAAGGCCTGGAATGGGTGGCGGTGATTAGCTATGATGGCAGCAACAAATATTATGCGGATAGC |
| | | GTGAAAGGCCGTTTTACCATTAGCCGTGATAACAGCAAAAACACCCTGAGCCTGCAGatgAAC |
| | | AGCCTGCGTGTGGAAGATACCGCGATTTATTATTGCGTGCGTGGCGCGGGCCGTGGCTATACC |
| | | AACGGCCCGGATGGCTTTGATATTTGGGGCCAGGGCACCatgGTGACCGTGAGCAGCAAGGGA |
| | | CCCTCGGTGTTCCCTCTCGCCCCCTCATCGAGGAGCACGTCCGAATCGACTGCGGCGCTGGGA |
| | | TGTCTCGTGAAGGACTACTTCCCCGAGCCCGTGACCGTGTCATGGAACTCAGGCGCATTGACC |
| | | TCGGGAGTGCACACGTTCCCGGCAGTGTTGCAGTCGTCGGGCCTTTACTCGCTGTCGTCCGTG |
| | | GTCACGGTGCCTTCGTCGAATTTCGGGACGCAGACTTACACATGTAATGTGGATCACAAACCG |
| | | TCCAATACCAAGGTCGATAAGACGGTCGAAAGGAAATGCTGCGTGGAATGTCCTCCCTGCCCA |
| | | GCACCGCCAGTCGCGGGTCCCAGCGTCTTTTTGTTCCCACCGAAGCCCAAGGACACACTGATG |
| | | ATCAGCCGTACGCCGGAGGTAACATGCGTAGTGGTAGATGTCTCGCATGAGGACCCTGAAGTG |
| | | CAGTTCAATTGGTATGTAGACGGCGTGGAGGTGCACAACGCCAAGACCAAGCCACGAGAAGAA |
| | | CAGTTCAACTCGACTTTTAGAGTGGTATCCGTCCTGACCGTCGTGCACCAGGACTGGCTCAAT |
| | | GGAAAGGAGTACAAATGCAAGGTATCCAACAAGGGGTTGCCAGCTCCAATCGAAAAGACCATC |
| | | TCAAAGACAAAGGGGCAGCCCAGAGAGCCCCAAGTGTATACGCTTCCACCCTCAAGGGAGGAG |
| | | ATGACAAAGAATCAGGTATCACTCACATGTTTGGTGAAAGGGTTTTATCCGAGCGATATTGCG |
| | | GTCGAGTGGGAAAGCAACGGTCAACCGGAGAACAACTATAAGACGACTCCCCCTATGCTGGAC |
| | | AGCGACGGGTCGTTCTTTCTGTATTCCAAACTCACGGTGGACAAATCGAGGTGGCAGCAAGGA |
| | | AACGTATTCTCATGCTCAGTAATGCACGAGGCCCTCCATAATCATTACACGCAGAAATCATTA |
| | | AGCTTATCGCCGGGT |
| 1362 | HC Ab18 | GAAGTGCAGCTGCTGGAAAGCGGCGGCGGCGTGGTGCAGCCGGGCCGTAGCCTGCGTCTGAGC |
| | | TGCGCGGCGAGCGGCTTTACCTTTAGCAGCTATGCGatgCATTGGGTGCGTCAGGCGCCGGGC |
| | | AAAGGCCTGGAATGGGTGGCGGTGATTAGCTATGATGGCAGCAACAAATATTATGCGGATAGC |
| | | GTGAAAGGCCGTTTTACCATTAGCCGTGATAACAGCAAAAACACCCTGAGCCTGCAGatgAAC |
| | | AGCCTGCGTGTGGAAGATACCGCGATTTATTATTGCGTGCGTGGCGCGGGCCGTGGCTTTACC |
| | | TGGGGCCCGGATGGCTTTGATATTTGGGGCCAGGGCACCatgGTGACCGTGAGCAGCAAGGGA |
| | | CCCTCGGTGTTCCCTCTCGCCCCCTCATCGAGGAGCACGTCCGAATCGACTGCGGCGCTGGGA |
| | | TGTCTCGTGAAGGACTACTTCCCCGAGCCCGTGACCGTGTCATGGAACTCAGGCGCATTGACC |
| | | TCGGGAGTGCACACGTTCCCGGCAGTGTTGCAGTCGTCGGGCCTTTACTCGCTGTCGTCCGTG |
| | | GTCACGGTGCCTTCGTCGAATTTCGGGACGCAGACTTACACATGTAATGTGGATCACAAACCG |
| | | TCCAATACCAAGGTCGATAAGACGGTCGAAAGGAAATGCTGCGTGGAATGTCCTCCCTGCCCA |
| | | GCACCGCCAGTCGCGGGTCCCAGCGTCTTTTTGTTCCCACCGAAGCCCAAGGACACACTGATG |
| | | ATCAGCCGTACGCCGGAGGTAACATGCGTAGTGGTAGATGTCTCGCATGAGGACCCTGAAGTG |
| | | CAGTTCAATTGGTATGTAGACGGCGTGGAGGTGCACAACGCCAAGACCAAGCCACGAGAAGAA |
| | | CAGTTCAACTCGACTTTTAGAGTGGTATCCGTCCTGACCGTCGTGCACCAGGACTGGCTCAAT |
| | | GGAAAGGAGTACAAATGCAAGGTATCCAACAAGGGGTTGCCAGCTCCAATCGAAAAGACCATC |
| | | TCAAAGACAAAGGGGCAGCCCAGAGAGCCCCAAGTGTATACGCTTCCACCCTCAAGGGAGGAG |
| | | ATGACAAAGAATCAGGTATCACTCACATGTTTGGTGAAAGGGTTTTATCCGAGCGATATTGCG |
| | | GTCGAGTGGGAAAGCAACGGTCAACCGGAGAACAACTATAAGACGACTCCCCCTATGCTGGAC |
| | | AGCGACGGGTCGTTCTTTCTGTATTCCAAACTCACGGTGGACAAATCGAGGTGGCAGCAAGGA |
| | | AACGTATTCTCATGCTCAGTAATGCACGAGGCCCTCCATAATCATTACACGCAGAAATCATTA |
| | | AGCTTATCGCCGGGT |
| 1363 | HC Ab19 | GAAGTGCAGCTGCTGGAAAGCGGCGGCGGCGTGGTGCAGCCGGGCCGTAGCCTGCGTCTGAGC |
| | | TGCGCGGCGAGCGGCTTTACCTTTAGCAGCTATGCGatgCATTGGGTGCGTCAGGCGCCGGGC |
| | | AAAGGCCTGGAATGGGTGGCGGTGATTAGCTATGATGGCAGCAACAAATATTATGCGGATAGC |
| | | GTGAAAGGCCGTTTTACCATTAGCCGTGATAACAGCAAAAACACCCTGAGCCTGCAGatgAAC |
| | | AGCCTGCGTGTGGAAGATACCGCGATTTATTATTGCGTGCGTGGCGCGGGCCGTGGCTTTACC |
| | | CTGGGCCCGGATGGCTTTGATATTTGGGGCCAGGGCACCatgGTGACCGTGAGCAGCAAGGGA |
| | | CCCTCGGTGTTCCCTCTCGCCCCCTCATCGAGGAGCACGTCCGAATCGACTGCGGCGCTGGGA |
| | | TGTCTCGTGAAGGACTACTTCCCCGAGCCCGTGACCGTGTCATGGAACTCAGGCGCATTGACC |
| | | TCGGGAGTGCACACGTTCCCGGCAGTGTTGCAGTCGTCGGGCCTTTACTCGCTGTCGTCCGTG |
| | | GTCACGGTGCCTTCGTCGAATTTCGGGACGCAGACTTACACATGTAATGTGGATCACAAACCG |
| | | TCCAATACCAAGGTCGATAAGACGGTCGAAAGGAAATGCTGCGTGGAATGTCCTCCCTGCCCA |
| | | GCACCGCCAGTCGCGGGTCCCAGCGTCTTTTTGTTCCCACCGAAGCCCAAGGACACACTGATG |
| | | ATCAGCCGTACGCCGGAGGTAACATGCGTAGTGGTAGATGTCTCGCATGAGGACCCTGAAGTG |
| | | CAGTTCAATTGGTATGTAGACGGCGTGGAGGTGCACAACGCCAAGACCAAGCCACGAGAAGAA |
| | | CAGTTCAACTCGACTTTTAGAGTGGTATCCGTCCTGACCGTCGTGCACCAGGACTGGCTCAAT |
| | | GGAAAGGAGTACAAATGCAAGGTATCCAACAAGGGGTTGCCAGCTCCAATCGAAAAGACCATC |
| | | TCAAAGACAAAGGGGCAGCCCAGAGAGCCCCAAGTGTATACGCTTCCACCCTCAAGGGAGGAG |
| | | ATGACAAAGAATCAGGTATCACTCACATGTTTGGTGAAAGGGTTTTATCCGAGCGATATTGCG |
| | | GTCGAGTGGGAAAGCAACGGTCAACCGGAGAACAACTATAAGACGACTCCCCCTATGCTGGAC |
| | | AGCGACGGGTCGTTCTTTCTGTATTCCAAACTCACGGTGGACAAATCGAGGTGGCAGCAAGGA |
| | | AACGTATTCTCATGCTCAGTAATGCACGAGGCCCTCCATAATCATTACACGCAGAAATCATTA |
| | | AGCTTATCGCCGGGT |
| 1364 | HC Ab20 | GAAGTGCAGCTGCTGGAAAGCGGCGGCGGCGTGGTGCAGCCGGGCCGTAGCCTGCGTCTGAGC |
| | | TGCGCGGCGAGCGGCTTTACCTTTAGCAGCTATGCGatgCATTGGGTGCGTCAGGCGCCGGGC |
| | | AAAGGCCTGGAATGGGTGGCGGTGATTAGCTATGATGGCAGCAACAAATATTATGCGGATAGC |
| | | GTGAAAGGCCGTTTTACCATTAGCCGTGATAACAGCAAAAACACCCTGAGCCTGCAGatgAAC |
| | | AGCCTGCGTGTGGAAGATACCGCGATTTATTATTGCGTGCGTGGCGCGGGCCGTGGCCTGACC |
| | | TTTGGCCCGGATGGCTTTGATATTTGGGGCCAGGGCACCatgGTGACCGTGAGCAGCAAGGGA |
| | | CCCTCGGTGTTCCCTCTCGCCCCCTCATCGAGGAGCACGTCCGAATCGACTGCGGCGCTGGGA |
| | | TGTCTCGTGAAGGACTACTTCCCCGAGCCCGTGACCGTGTCATGGAACTCAGGCGCATTGACC |
| | | TCGGGAGTGCACACGTTCCCGGCAGTGTTGCAGTCGTCGGGCCTTTACTCGCTGTCGTCCGTG |
| | | GTCACGGTGCCTTCGTCGAATTTCGGGACGCAGACTTACACATGTAATGTGGATCACAAACCG |
| | | TCCAATACCAAGGTCGATAAGACGGTCGAAAGGAAATGCTGCGTGGAATGTCCTCCCTGCCCA |
| | | GCACCGCCAGTCGCGGGTCCCAGCGTCTTTTTGTTCCCACCGAAGCCCAAGGACACACTGATG |
| | | ATCAGCCGTACGCCGGAGGTAACATGCGTAGTGGTAGATGTCTCGCATGAGGACCCTGAAGTG |
| | | CAGTTCAATTGGTATGTAGACGGCGTGGAGGTGCACAACGCCAAGACCAAGCCACGAGAAGAA |
| | | CAGTTCAACTCGACTTTTAGAGTGGTATCCGTCCTGACCGTCGTGCACCAGGACTGGCTCAAT |
| | | GGAAAGGAGTACAAATGCAAGGTATCCAACAAGGGGTTGCCAGCTCCAATCGAAAAGACCATC |
| | | TCAAAGACAAAGGGGCAGCCCAGAGAGCCCCAAGTGTATACGCTTCCACCCTCAAGGGAGGAG |
| | | ATGACAAAGAATCAGGTATCACTCACATGTTTGGTGAAAGGGTTTTATCCGAGCGATATTGCG |
| | | GTCGAGTGGGAAAGCAACGGTCAACCGGAGAACAACTATAAGACGACTCCCCCTATGCTGGAC |
| | | AGCGACGGGTCGTTCTTTCTGTATTCCAAACTCACGGTGGACAAATCGAGGTGGCAGCAAGGA |
| | | AACGTATTCTCATGCTCAGTAATGCACGAGGCCCTCCATAATCATTACACGCAGAAATCATTA |
| | | AGCTTATCGCCGGGT |
| 1365 | HC Ab21 | GAAGTGCAGCTGCTGGAAAGCGGCGGCGGCGTGGTGCAGCCGGGCCGTAGCCTGCGTCTGAGC |
| | | TGCGCGGCGAGCGGCTTTACCTTTAGCAGCTATGCGatgCATTGGGTGCGTCAGGCGCCGGGC |
| | | AAAGGCCTGGAATGGGTGGCGGTGATTAGCTATGATGGCAGCAACAAATATTATGCGGATAGC |
| | | GTGAAAGGCCGTTTTACCATTAGCCGTGATAACAGCAAAAACACCCTGAGCCTGCAGatgAAC |
| | | AGCCTGCGTGTGGAAGATACCGCGATTTATTATTGCGTGCGTGGCGCGGGCCTGGGCTGGCCG |
| | | TATGGCCCGGATGGCTTTGATATTTGGGGCCAGGGCACCatgGTGACCGTGAGCAGCAAGGGA |
| | | CCCTCGGTGTTCCCTCTCGCCCCCTCATCGAGGAGCACGTCCGAATCGACTGCGGCGCTGGGA |
| | | TGTCTCGTGAAGGACTACTTCCCCGAGCCCGTGACCGTGTCATGGAACTCAGGCGCATTGACC |
| | | TCGGGAGTGCACACGTTCCCGGCAGTGTTGCAGTCGTCGGGCCTTTACTCGCTGTCGTCCGTG |
| | | GTCACGGTGCCTTCGTCGAATTTCGGGACGCAGACTTACACATGTAATGTGGATCACAAACCG |
| | | TCCAATACCAAGGTCGATAAGACGGTCGAAAGGAAATGCTGCGTGGAATGTCCTCCCTGCCCA |
| | | GCACCGCCAGTCGCGGGTCCCAGCGTCTTTTTGTTCCCACCGAAGCCCAAGGACACACTGATG |
| | | ATCAGCCGTACGCCGGAGGTAACATGCGTAGTGGTAGATGTCTCGCATGAGGACCCTGAAGTG |
| | | CAGTTCAATTGGTATGTAGACGGCGTGGAGGTGCACAACGCCAAGACCAAGCCACGAGAAGAA |
| | | CAGTTCAACTCGACTTTTAGAGTGGTATCCGTCCTGACCGTCGTGCACCAGGACTGGCTCAAT |
| | | GGAAAGGAGTACAAATGCAAGGTATCCAACAAGGGGTTGCCAGCTCCAATCGAAAAGACCATC |
| | | TCAAAGACAAAGGGGCAGCCCAGAGAGCCCCAAGTGTATACGCTTCCACCCTCAAGGGAGGAG |
| | | ATGACAAAGAATCAGGTATCACTCACATGTTTGGTGAAAGGGTTTTATCCGAGCGATATTGCG |
| | | GTCGAGTGGGAAAGCAACGGTCAACCGGAGAACAACTATAAGACGACTCCCCCTATGCTGGAC |
| | | AGCGACGGGTCGTTCTTTCTGTATTCCAAACTCACGGTGGACAAATCGAGGTGGCAGCAAGGA |
| | | AACGTATTCTCATGCTCAGTAATGCACGAGGCCCTCCATAATCATTACACGCAGAAATCATTA |
| | | AGCTTATCGCCGGGT |
| 1366 | HC Ab22 | GAAGTGCAGCTGCTGGAAAGCGGCGGCGGCGTGGTGCAGCCGGGCCGTAGCCTGCGTCTGAGC |
| | | TGCGCGGCGAGCGGCTTTACCTTTAGCAGCTATGCGatgCATTGGGTGCGTCAGGCGCCGGGC |
| | | AAAGGCCTGGAATGGGTGGCGGTGATTAGCTATGATGGCAGCAACAAATATTATGCGGATAGC |
| | | GTGAAAGGCCGTTTTACCATTAGCCGTGATAACAGCAAAAACACCCTGAGCCTGCAGatgAAC |
| | | AGCCTGCGTGTGGAAGATACCGCGATTTATTATTGCGTGCGTGGCGCGGGCCGTGGCTTTACC |
| | | AAAGGCCCGGATGGCTTTGATATTTGGGGCCAGGGCACCatgGTGACCGTGAGCAGCAAGGGA |
| | | CCCTCGGTGTTCCCTCTCGCCCCCTCATCGAGGAGCACGTCCGAATCGACTGCGGCGCTGGGA |
| | | TGTCTCGTGAAGGACTACTTCCCCGAGCCCGTGACCGTGTCATGGAACTCAGGCGCATTGACC |
| | | TCGGGAGTGCACACGTTCCCGGCAGTGTTGCAGTCGTCGGGCCTTTACTCGCTGTCGTCCGTG |
| | | GTCACGGTGCCTTCGTCGAATTTCGGGACGCAGACTTACACATGTAATGTGGATCACAAACCG |
| | | TCCAATACCAAGGTCGATAAGACGGTCGAAAGGAAATGCTGCGTGGAATGTCCTCCCTGCCCA |
| | | GCACCGCCAGTCGCGGGTCCCAGCGTCTTTTTGTTCCCACCGAAGCCCAAGGACACACTGATG |
| | | ATCAGCCGTACGCCGGAGGTAACATGCGTAGTGGTAGATGTCTCGCATGAGGACCCTGAAGTG |
| | | CAGTTCAATTGGTATGTAGACGGCGTGGAGGTGCACAACGCCAAGACCAAGCCACGAGAAGAA |
| | | CAGTTCAACTCGACTTTTAGAGTGGTATCCGTCCTGACCGTCGTGCACCAGGACTGGCTCAAT |
| | | GGAAAGGAGTACAAATGCAAGGTATCCAACAAGGGGTTGCCAGCTCCAATCGAAAAGACCATC |
| | | TCAAAGACAAAGGGGCAGCCCAGAGAGCCCCAAGTGTATACGCTTCCACCCTCAAGGGAGGAG |
| | | ATGACAAAGAATCAGGTATCACTCACATGTTTGGTGAAAGGGTTTTATCCGAGCGATATTGCG |
| | | GTCGAGTGGGAAAGCAACGGTCAACCGGAGAACAACTATAAGACGACTCCCCCTATGCTGGAC |
| | | AGCGACGGGTCGTTCTTTCTGTATTCCAAACTCACGGTGGACAAATCGAGGTGGCAGCAAGGA |
| | | AACGTATTCTCATGCTCAGTAATGCACGAGGCCCTCCATAATCATTACACGCAGAAATCATTA |
| | | AGCTTATCGCCGGGT |
| 1367 | HC Ab23 | GAAGTGCAGCTGCTGGAAAGCGGCGGCGGCGTGGTGCAGCCGGGCCGTAGCCTGCGTCTGAGC |
| | | TGCGCGGCGAGCGGCTTTACCTTTAGCAGCTATGCGatgCATTGGGTGCGTCAGGCGCCGGGC |
| | | AAAGGCCTGGAATGGGTGGCGGTGATTAGCTATGATGGCAGCAACAAATATTATGCGGATAGC |
| | | GTGAAAGGCCGTTTTACCATTAGCCGTGATAACAGCAAAAACACCCTGAGCCTGCAGatgAAC |
| | | AGCCTGCGTGTGGAAGATACCGCGATTTATTATTGCGTGCGTGGCGCGGGCCGTGGCCTGACC |
| | | TATGGCCCGGATGGCTTTGATATTTGGGGCCAGGGCACCatgGTGACCGTGAGCAGCAAGGGA |
| | | CCCTCGGTGTTCCCTCTCGCCCCCTCATCGAGGAGCACGTCCGAATCGACTGCGGCGCTGGGA |
| | | TGTCTCGTGAAGGACTACTTCCCCGAGCCCGTGACCGTGTCATGGAACTCAGGCGCATTGACC |
| | | TCGGGAGTGCACACGTTCCCGGCAGTGTTGCAGTCGTCGGGCCTTTACTCGCTGTCGTCCGTG |
| | | GTCACGGTGCCTTCGTCGAATTTCGGGACGCAGACTTACACATGTAATGTGGATCACAAACCG |
| | | TCCAATACCAAGGTCGATAAGACGGTCGAAAGGAAATGCTGCGTGGAATGTCCTCCCTGCCCA |
| | | GCACCGCCAGTCGCGGGTCCCAGCGTCTTTTTGTTCCCACCGAAGCCCAAGGACACACTGATG |
| | | ATCAGCCGTACGCCGGAGGTAACATGCGTAGTGGTAGATGTCTCGCATGAGGACCCTGAAGTG |
| | | CAGTTCAATTGGTATGTAGACGGCGTGGAGGTGCACAACGCCAAGACCAAGCCACGAGAAGAA |
| | | CAGTTCAACTCGACTTTTAGAGTGGTATCCGTCCTGACCGTCGTGCACCAGGACTGGCTCAAT |
| | | GGAAAGGAGTACAAATGCAAGGTATCCAACAAGGGGTTGCCAGCTCCAATCGAAAAGACCATC |
| | | TCAAAGACAAAGGGGCAGCCCAGAGAGCCCCAAGTGTATACGCTTCCACCCTCAAGGGAGGAG |
| | | ATGACAAAGAATCAGGTATCACTCACATGTTTGGTGAAAGGGTTTTATCCGAGCGATATTGCG |
| | | GTCGAGTGGGAAAGCAACGGTCAACCGGAGAACAACTATAAGACGACTCCCCCTATGCTGGAC |
| | | AGCGACGGGTCGTTCTTTCTGTATTCCAAACTCACGGTGGACAAATCGAGGTGGCAGCAAGGA |
| | | AACGTATTCTCATGCTCAGTAATGCACGAGGCCCTCCATAATCATTACACGCAGAAATCATTA |
| | | AGCTTATCGCCGGGT |
| 1368 | HC Ab24 | GAAGTGCAGCTGCTGGAAAGCGGCGGCGGCGTGGTGCAGCCGGGCCGTAGCCTGCGTCTGAGC |
| | | TGCGCGGCGAGCGGCTTTACCTTTAGCAGCTATGCGatgCATTGGGTGCGTCAGGCGCCGGGC |
| | | AAAGGCCTGGAATGGGTGGCGGTGATTAGCTATGATGGCAGCAACAAATATTATGCGGATAGC |
| | | GTGAAAGGCCGTTTTACCATTAGCCGTGATAACAGCAAAAACACCCTGAGCCTGCAGatgAAC |
| | | AGCCTGCGTGTGGAAGATACCGCGATTTATTATTGCGTGCGTGGCGCGGGCCGTGGCCTGATT |
| | | TATGGCCCGGATGGCTTTGATATTTGGGGCCAGGGCACCatgGTGACCGTGAGCAGCAAGGGA |
| | | CCCTCGGTGTTCCCTCTCGCCCCCTCATCGAGGAGCACGTCCGAATCGACTGCGGCGCTGGGA |
| | | TGTCTCGTGAAGGACTACTTCCCCGAGCCCGTGACCGTGTCATGGAACTCAGGCGCATTGACC |
| | | TCGGGAGTGCACACGTTCCCGGCAGTGTTGCAGTCGTCGGGCCTTTACTCGCTGTCGTCCGTG |
| | | GTCACGGTGCCTTCGTCGAATTTCGGGACGCAGACTTACACATGTAATGTGGATCACAAACCG |
| | | TCCAATACCAAGGTCGATAAGACGGTCGAAAGGAAATGCTGCGTGGAATGTCCTCCCTGCCCA |
| | | GCACCGCCAGTCGCGGGTCCCAGCGTCTTTTTGTTCCCACCGAAGCCCAAGGACACACTGATG |
| | | ATCAGCCGTACGCCGGAGGTAACATGCGTAGTGGTAGATGTCTCGCATGAGGACCCTGAAGTG |
| | | CAGTTCAATTGGTATGTAGACGGCGTGGAGGTGCACAACGCCAAGACCAAGCCACGAGAAGAA |
| | | CAGTTCAACTCGACTTTTAGAGTGGTATCCGTCCTGACCGTCGTGCACCAGGACTGGCTCAAT |
| | | GGAAAGGAGTACAAATGCAAGGTATCCAACAAGGGGTTGCCAGCTCCAATCGAAAAGACCATC |
| | | TCAAAGACAAAGGGGCAGCCCAGAGAGCCCCAAGTGTATACGCTTCCACCCTCAAGGGAGGAG |
| | | ATGACAAAGAATCAGGTATCACTCACATGTTTGGTGAAAGGGTTTTATCCGAGCGATATTGCG |
| | | GTCGAGTGGGAAAGCAACGGTCAACCGGAGAACAACTATAAGACGACTCCCCCTATGCTGGAC |
| | | AGCGACGGGTCGTTCTTTCTGTATTCCAAACTCACGGTGGACAAATCGAGGTGGCAGCAAGGA |
| | | AACGTATTCTCATGCTCAGTAATGCACGAGGCCCTCCATAATCATTACACGCAGAAATCATTA |
| | | AGCTTATCGCCGGGT |
| 1369 | HC Ab25 | GAAGTGCAGCTGCTGGAAAGCGGCGGCGGCGTGGTGCAGCCGGGCCGTAGCCTGCGTCTGAGC |
| | | TGCGCGGCGAGCGGCTTTACCTTTAGCAGCTATGCGatgCATTGGGTGCGTCAGGCGCCGGGC |
| | | AAAGGCCTGGAATGGGTGGCGGTGATTAGCTATGATGGCAGCAACAAATATTATGCGGATAGC |
| | | GTGAAAGGCCGTTTTACCATTAGCCGTGATAACAGCAAAAACACCCTGAGCCTGCAGatgAAC |
| | | AGCCTGCGTGTGGAAGATACCGCGATTTATTATTGCGTGCGTGGCGCGGGCCTGGGCTTTACC |
| | | TATGGCCCGGATGGCTTTGATATTTGGGGCCAGGGCACCatgGTGACCGTGAGCAGCAAGGGA |
| | | CCCTCGGTGTTCCCTCTCGCCCCCTCATCGAGGAGCACGTCCGAATCGACTGCGGCGCTGGGA |
| | | TGTCTCGTGAAGGACTACTTCCCCGAGCCCGTGACCGTGTCATGGAACTCAGGCGCATTGACC |
| | | TCGGGAGTGCACACGTTCCCGGCAGTGTTGCAGTCGTCGGGCCTTTACTCGCTGTCGTCCGTG |
| | | GTCACGGTGCCTTCGTCGAATTTCGGGACGCAGACTTACACATGTAATGTGGATCACAAACCG |
| | | TCCAATACCAAGGTCGATAAGACGGTCGAAAGGAAATGCTGCGTGGAATGTCCTCCCTGCCCA |
| | | GCACCGCCAGTCGCGGGTCCCAGCGTCTTTTTGTTCCCACCGAAGCCCAAGGACACACTGATG |
| | | ATCAGCCGTACGCCGGAGGTAACATGCGTAGTGGTAGATGTCTCGCATGAGGACCCTGAAGTG |
| | | CAGTTCAATTGGTATGTAGACGGCGTGGAGGTGCACAACGCCAAGACCAAGCCACGAGAAGAA |
| | | CAGTTCAACTCGACTTTTAGAGTGGTATCCGTCCTGACCGTCGTGCACCAGGACTGGCTCAAT |
| | | GGAAAGGAGTACAAATGCAAGGTATCCAACAAGGGGTTGCCAGCTCCAATCGAAAAGACCATC |
| | | TCAAAGACAAAGGGGCAGCCCAGAGAGCCCCAAGTGTATACGCTTCCACCCTCAAGGGAGGAG |
| | | ATGACAAAGAATCAGGTATCACTCACATGTTTGGTGAAAGGGTTTTATCCGAGCGATATTGCG |
| | | GTCGAGTGGGAAAGCAACGGTCAACCGGAGAACAACTATAAGACGACTCCCCCTATGCTGGAC |
| | | AGCGACGGGTCGTTCTTTCTGTATTCCAAACTCACGGTGGACAAATCGAGGTGGCAGCAAGGA |
| | | AACGTATTCTCATGCTCAGTAATGCACGAGGCCCTCCATAATCATTACACGCAGAAATCATTA |
| | | AGCTTATCGCCGGGT |
| 1370 | HC Ab26 | GAAGTGCAGCTGCTGGAAAGCGGCGGCGGCGTGGTGCAGCCGGGCCGTAGCCTGCGTCTGAGC |
| | | TGCGCGGCGAGCGGCTTTACCTTTAGCAGCTATGCGatgCATTGGGTGCGTCAGGCGCCGGGC |
| | | AAAGGCCTGGAATGGGTGGCGGTGATTAGCTATGATGGCAGCAACAAATATTATGCGGATAGC |
| | | GTGAAAGGCCGTTTTACCATTAGCCGTGATAACAGCAAAAACACCCTGAGCCTGCAGatgAAC |
| | | AGCCTGCGTGTGGAAGATACCGCGATTTATTATTGCGTGCGTGGCGCGGGCCAGGGCCTGAGC |
| | | TATGGCCCGGATGGCTTTGATATTTGGGGCCAGGGCACCatgGTGACCGTGAGCAGCAAGGGA |
| | | CCCTCGGTGTTCCCTCTCGCCCCCTCATCGAGGAGCACGTCCGAATCGACTGCGGCGCTGGGA |
| | | TGTCTCGTGAAGGACTACTTCCCCGAGCCCGTGACCGTGTCATGGAACTCAGGCGCATTGACC |
| | | TCGGGAGTGCACACGTTCCCGGCAGTGTTGCAGTCGTCGGGCCTTTACTCGCTGTCGTCCGTG |
| | | GTCACGGTGCCTTCGTCGAATTTCGGGACGCAGACTTACACATGTAATGTGGATCACAAACCG |
| | | TCCAATACCAAGGTCGATAAGACGGTCGAAAGGAAATGCTGCGTGGAATGTCCTCCCTGCCCA |
| | | GCACCGCCAGTCGCGGGTCCCAGCGTCTTTTTGTTCCCACCGAAGCCCAAGGACACACTGATG |
| | | ATCAGCCGTACGCCGGAGGTAACATGCGTAGTGGTAGATGTCTCGCATGAGGACCCTGAAGTG |
| | | CAGTTCAATTGGTATGTAGACGGCGTGGAGGTGCACAACGCCAAGACCAAGCCACGAGAAGAA |
| | | CAGTTCAACTCGACTTTTAGAGTGGTATCCGTCCTGACCGTCGTGCACCAGGACTGGCTCAAT |
| | | GGAAAGGAGTACAAATGCAAGGTATCCAACAAGGGGTTGCCAGCTCCAATCGAAAAGACCATC |
| | | TCAAAGACAAAGGGGCAGCCCAGAGAGCCCCAAGTGTATACGCTTCCACCCTCAAGGGAGGAG |
| | | ATGACAAAGAATCAGGTATCACTCACATGTTTGGTGAAAGGGTTTTATCCGAGCGATATTGCG |
| | | GTCGAGTGGGAAAGCAACGGTCAACCGGAGAACAACTATAAGACGACTCCCCCTATGCTGGAC |
| | | AGCGACGGGTCGTTCTTTCTGTATTCCAAACTCACGGTGGACAAATCGAGGTGGCAGCAAGGA |
| | | AACGTATTCTCATGCTCAGTAATGCACGAGGCCCTCCATAATCATTACACGCAGAAATCATTA |
| | | AGCTTATCGCCGGGT |
| 1371 | HC Ab27 | GAAGTGCAGCTGCTGGAAAGCGGCGGCGGCGTGGTGCAGCCGGGCCGTAGCCTGCGTCTGAGC |
| | | TGCGCGGCGAGCGGCTTTACCTTTAGCAGCTATGCGatgCATTGGGTGCGTCAGGCGCCGGGC |
| | | AAAGGCCTGGAATGGGTGGCGGTGATTAGCTATGATGGCAGCAACAAATATTATGCGGATAGC |
| | | GTGAAAGGCCGTTTTACCATTAGCCGTGATAACAGCAAAAACACCCTGAGCCTGCAGatgAAC |
| | | AGCCTGCGTGTGGAAGATACCGCGATTTATTATTGCGTGCGTGGCGCGGGCCGTGGCTATACC |
| | | CTGGGCCCGGATGGCTTTGATATTTGGGGCCAGGGCACCatgGTGACCGTGAGCAGCAAGGGA |
| | | CCCTCGGTGTTCCCTCTCGCCCCCTCATCGAGGAGCACGTCCGAATCGACTGCGGCGCTGGGA |
| | | TGTCTCGTGAAGGACTACTTCCCCGAGCCCGTGACCGTGTCATGGAACTCAGGCGCATTGACC |
| | | TCGGGAGTGCACACGTTCCCGGCAGTGTTGCAGTCGTCGGGCCTTTACTCGCTGTCGTCCGTG |
| | | GTCACGGTGCCTTCGTCGAATTTCGGGACGCAGACTTACACATGTAATGTGGATCACAAACCG |
| | | TCCAATACCAAGGTCGATAAGACGGTCGAAAGGAAATGCTGCGTGGAATGTCCTCCCTGCCCA |
| | | GCACCGCCAGTCGCGGGTCCCAGCGTCTTTTTGTTCCCACCGAAGCCCAAGGACACACTGATG |
| | | ATCAGCCGTACGCCGGAGGTAACATGCGTAGTGGTAGATGTCTCGCATGAGGACCCTGAAGTG |
| | | CAGTTCAATTGGTATGTAGACGGCGTGGAGGTGCACAACGCCAAGACCAAGCCACGAGAAGAA |
| | | CAGTTCAACTCGACTTTTAGAGTGGTATCCGTCCTGACCGTCGTGCACCAGGACTGGCTCAAT |
| | | GGAAAGGAGTACAAATGCAAGGTATCCAACAAGGGGTTGCCAGCTCCAATCGAAAAGACCATC |
| | | TCAAAGACAAAGGGGCAGCCCAGAGAGCCCCAAGTGTATACGCTTCCACCCTCAAGGGAGGAG |
| | | ATGACAAAGAATCAGGTATCACTCACATGTTTGGTGAAAGGGTTTTATCCGAGCGATATTGCG |
| | | GTCGAGTGGGAAAGCAACGGTCAACCGGAGAACAACTATAAGACGACTCCCCCTATGCTGGAC |
| | | AGCGACGGGTCGTTCTTTCTGTATTCCAAACTCACGGTGGACAAATCGAGGTGGCAGCAAGGA |
| | | AACGTATTCTCATGCTCAGTAATGCACGAGGCCCTCCATAATCATTACACGCAGAAATCATTA |
| | | AGCTTATCGCCGGGT |
| 1372 | HC Ab28 | GAAGTGCAGCTGCTGGAAAGCGGCGGCGGCGTGGTGCAGCCGGGCCGTAGCCTGCGTCTGAGC |
| | | TGCGCGGCGAGCGGCTTTACCTTTAGCAGCTATGCGatgCATTGGGTGCGTCAGGCGCCGGGC |
| | | AAAGGCCTGGAATGGGTGGCGGTGATTAGCTATGATGGCAGCAACAAATATTATGCGGATAGC |
| | | GTGAAAGGCCGTTTTACCATTAGCCGTGATAACAGCAAAAACACCCTGAGCCTGCAGatgAAC |
| | | AGCCTGCGTGTGGAAGATACCGCGATTTATTATTGCGTGCGTGGCGCGGGCCGTGGCTTTACC |
| | | TATGGCCCGGATGGCTTTGATATTTGGGGCCAGGGCACCatgGTGACCGTGAGCAGCAAGGGA |
| | | CCCTCGGTGTTCCCTCTCGCCCCCTCATCGAGGAGCACGTCCGAATCGACTGCGGCGCTGGGA |
| | | TGTCTCGTGAAGGACTACTTCCCCGAGCCCGTGACCGTGTCATGGAACTCAGGCGCATTGACC |
| | | TCGGGAGTGCACACGTTCCCGGCAGTGTTGCAGTCGTCGGGCCTTTACTCGCTGTCGTCCGTG |
| | | GTCACGGTGCCTTCGTCGAATTTCGGGACGCAGACTTACACATGTAATGTGGATCACAAACCG |
| | | TCCAATACCAAGGTCGATAAGACGGTCGAAAGGAAATGCTGCGTGGAATGTCCTCCCTGCCCA |
| | | GCACCGCCAGTCGCGGGTCCCAGCGTCTTTTTGTTCCCACCGAAGCCCAAGGACACACTGATG |
| | | ATCAGCCGTACGCCGGAGGTAACATGCGTAGTGGTAGATGTCTCGCATGAGGACCCTGAAGTG |
| | | CAGTTCAATTGGTATGTAGACGGCGTGGAGGTGCACAACGCCAAGACCAAGCCACGAGAAGAA |
| | | CAGTTCAACTCGACTTTTAGAGTGGTATCCGTCCTGACCGTCGTGCACCAGGACTGGCTCAAT |
| | | GGAAAGGAGTACAAATGCAAGGTATCCAACAAGGGGTTGCCAGCTCCAATCGAAAAGACCATC |
| | | TCAAAGACAAAGGGGCAGCCCAGAGAGCCCCAAGTGTATACGCTTCCACCCTCAAGGGAGGAG |
| | | ATGACAAAGAATCAGGTATCACTCACATGTTTGGTGAAAGGGTTTTATCCGAGCGATATTGCG |
| | | GTCGAGTGGGAAAGCAACGGTCAACCGGAGAACAACTATAAGACGACTCCCCCTATGCTGGAC |
| | | AGCGACGGGTCGTTCTTTCTGTATTCCAAACTCACGGTGGACAAATCGAGGTGGCAGCAAGGA |
| | | AACGTATTCTCATGCTCAGTAATGCACGAGGCCCTCCATAATCATTACACGCAGAAATCATTA |
| | | AGCTTATCGCCGGGT |
| 1373 | HC Ab29 | GAAGTGCAGCTGCTGGAAAGCGGCGGCGGCGTGGTGCAGCCGGGCCGTAGCCTGCGTCTGAGC |
| | | TGCGCGGCGAGCGGCTTTACCTTTAGCAGCTATGCGatgCATTGGGTGCGTCAGGCGCCGGGC |
| | | AAAGGCCTGGAATGGGTGGCGGTGATTAGCTATGATGGCAGCAACAAATATTATGCGGATAGC |
| | | GTGAAAGGCCGTTTTACCATTAGCCGTGATAACAGCAAAAACACCCTGAGCCTGCAGatgAAC |
| | | AGCCTGCGTGTGGAAGATACCGCGATTTATTATTGCGTGCGTGGCGCGGGCCTGGGCTGGCCG |
| | | TATGGCCCGGATGGCTTTGATATTTGGGGCCAGGGCACCatgGTGACCGTGAGCAGCAAGGGA |
| | | CCCTCGGTGTTCCCTCTCGCCCCCTCATCGAGGAGCACGTCCGAATCGACTGCGGCGCTGGGA |
| | | TGTCTCGTGAAGGACTACTTCCCCGAGCCCGTGACCGTGTCATGGAACTCAGGCGCATTGACC |
| | | TCGGGAGTGCACACGTTCCCGGCAGTGTTGCAGTCGTCGGGCCTTTACTCGCTGTCGTCCGTG |
| | | GTCACGGTGCCTTCGTCGAATTTCGGGACGCAGACTTACACATGTAATGTGGATCACAAACCG |
| | | TCCAATACCAAGGTCGATAAGACGGTCGAAAGGAAATGCTGCGTGGAATGTCCTCCCTGCCCA |
| | | GCACCGCCAGTCGCGGGTCCCAGCGTCTTTTTGTTCCCACCGAAGCCCAAGGACACACTGATG |
| | | ATCAGCCGTACGCCGGAGGTAACATGCGTAGTGGTAGATGTCTCGCATGAGGACCCTGAAGTG |
| | | CAGTTCAATTGGTATGTAGACGGCGTGGAGGTGCACAACGCCAAGACCAAGCCACGAGAAGAA |
| | | CAGTTCAACTCGACTTTTAGAGTGGTATCCGTCCTGACCGTCGTGCACCAGGACTGGCTCAAT |
| | | GGAAAGGAGTACAAATGCAAGGTATCCAACAAGGGGTTGCCAGCTCCAATCGAAAAGACCATC |
| | | TCAAAGACAAAGGGGCAGCCCAGAGAGCCCCAAGTGTATACGCTTCCACCCTCAAGGGAGGAG |
| | | ATGACAAAGAATCAGGTATCACTCACATGTTTGGTGAAAGGGTTTTATCCGAGCGATATTGCG |
| | | GTCGAGTGGGAAAGCAACGGTCAACCGGAGAACAACTATAAGACGACTCCCCCTATGCTGGAC |
| | | AGCGACGGGTCGTTCTTTCTGTATTCCAAACTCACGGTGGACAAATCGAGGTGGCAGCAAGGA |
| | | AACGTATTCTCATGCTCAGTAATGCACGAGGCCCTCCATAATCATTACACGCAGAAATCATTA |
| | | AGCTTATCGCCGGGT |
| 1374 | HC Ab30 | GAAGTGCAGCTGCTGGAAAGCGGCGGCGGCGTGGTGCAGCCGGGCCGTAGCCTGCGTCTGAGC |
| | | TGCGCGGCGAGCGGCTTTACCTTTAGCAGCTATGCGatgCATTGGGTGCGTCAGGCGCCGGGC |
| | | AAAGGCCTGGAATGGGTGGCGGTGATTAGCTATGATGGCAGCAACAAATATTATGCGGATAGC |
| | | GTGAAAGGCCGTTTTACCATTAGCCGTGATAACAGCAAAAACACCCTGAGCCTGCAGatgAAC |
| | | AGCCTGCGTGTGNNNAAANNNNNNATTTATTATTGCGTGCGTGGCGCGGGCCGTGGCTTTACC |
| | | TGGGGCCCGGATGGCTTTGATATTTGGGGCCAGGGCACCatgGTGACCGTGAGCAGCAAGGGA |
| | | CCCTCGGTGTTCCCTCTCGCCCCCTCATCGAGGAGCACGTCCGAATCGACTGCGGCGCTGGGA |
| | | TGTCTCGTGAAGGACTACTTCCCCGAGCCCGTGACCGTGTCATGGAACTCAGGCGCATTGACC |
| | | TCGGGAGTGCACACGTTCCCGGCAGTGTTGCAGTCGTCGGGCCTTTACTCGCTGTCGTCCGTG |
| | | GTCACGGTGCCTTCGTCGAATTTCGGGACGCAGACTTACACATGTAATGTGGATCACAAACCG |
| | | TCCAATACCAAGGTCGATAAGACGGTCGAAAGGAAATGCTGCGTGGAATGTCCTCCCTGCCCA |
| | | GCACCGCCAGTCGCGGGTCCCAGCGTCTTTTTGTTCCCACCGAAGCCCAAGGACACACTGATG |
| | | ATCAGCCGTACGCCGGAGGTAACATGCGTAGTGGTAGATGTCTCGCATGAGGACCCTGAAGTG |
| | | CAGTTCAATTGGTATGTAGACGGCGTGGAGGTGCACAACGCCAAGACCAAGCCACGAGAAGAA |
| | | CAGTTCAACTCGACTTTTAGAGTGGTATCCGTCCTGACCGTCGTGCACCAGGACTGGCTCAAT |
| | | GGAAAGGAGTACAAATGCAAGGTATCCAACAAGGGGTTGCCAGCTCCAATCGAAAAGACCATC |
| | | TCAAAGACAAAGGGGCAGCCCAGAGAGCCCCAAGTGTATACGCTTCCACCCTCAAGGGAGGAG |
| | | ATGACAAAGAATCAGGTATCACTCACATGTTTGGTGAAAGGGTTTTATCCGAGCGATATTGCG |
| | | GTCGAGTGGGAAAGCAACGGTCAACCGGAGAACAACTATAAGACGACTCCCCCTATGCTGGAC |
| | | AGCGACGGGTCGTTCTTTCTGTATTCCAAACTCACGGTGGACAAATCGAGGTGGCAGCAAGGA |
| | | AACGTATTCTCATGCTCAGTAATGCACGAGGCCCTCCATAATCATTACACGCAGAAATCATTA |
| | | AGCTTATCGCCGGGT |
| 1375 | HC Ab31 | GAAGTGCAGCTGCTGGAAAGCGGCGGCGGCGTGGTGCAGCCGGGCCGTAGCCTGCGTCTGAGC |
| | | TGCGCGGCGAGCGGCTTTACCTTTAGCAGCTATGCGatgCATTGGGTGCGTCAGGCGCCGGGC |
| | | AAAGGCCTGGAATGGGTGGCGGTGATTAGCTATGATGGCAGCAACAAATATTATGCGGATAGC |
| | | GTGAAAGGCCGTTTTACCATTAGCCGTGATAACAGCAAAAACACCCTGAGCCTGCAGatgAAC |
| | | AGCCTGCGTGTGGAAGATACCGCGATTTATTATTGCGTGCGTGGCGCGGGCCGTGGCCTGACC |
| | | TATGGCCCGGATGGCTTTGATATTTGGGGCCAGGGCACCatgGTGACCGTGAGCAGCAAGGGA |
| | | CCCTCGGTGTTCCCTCTCGCCCCCTCATCGAGGAGCACGTCCGAATCGACTGCGGCGCTGGGA |
| | | TGTCTCGTGAAGGACTACTTCCCCGAGCCCGTGACCGTGTCATGGAACTCAGGCGCATTGACC |
| | | TCGGGAGTGCACACGTTCCCGGCAGTGTTGCAGTCGTCGGGCCTTTACTCGCTGTCGTCCGTG |
| | | GTCACGGTGCCTTCGTCGAATTTCGGGACGCAGACTTACACATGTAATGTGGATCACAAACCG |
| | | TCCAATACCAAGGTCGATAAGACGGTCGAAAGGAAATGCTGCGTGGAATGTCCTCCCTGCCCA |
| | | GCACCGCCAGTCGCGGGTCCCAGCGTCTTTTTGTTCCCACCGAAGCCCAAGGACACACTGATG |
| | | ATCAGCCGTACGCCGGAGGTAACATGCGTAGTGGTAGATGTCTCGCATGAGGACCCTGAAGTG |
| | | CAGTTCAATTGGTATGTAGACGGCGTGGAGGTGCACAACGCCAAGACCAAGCCACGAGAAGAA |
| | | CAGTTCAACTCGACTTTTAGAGTGGTATCCGTCCTGACCGTCGTGCACCAGGACTGGCTCAAT |
| | | GGAAAGGAGTACAAATGCAAGGTATCCAACAAGGGGTTGCCAGCTCCAATCGAAAAGACCATC |
| | | TCAAAGACAAAGGGGCAGCCCAGAGAGCCCCAAGTGTATACGCTTCCACCCTCAAGGGAGGAG |
| | | ATGACAAAGAATCAGGTATCACTCACATGTTTGGTGAAAGGGTTTTATCCGAGCGATATTGCG |
| | | GTCGAGTGGGAAAGCAACGGTCAACCGGAGAACAACTATAAGACGACTCCCCCTATGCTGGAC |
| | | AGCGACGGGTCGTTCTTTCTGTATTCCAAACTCACGGTGGACAAATCGAGGTGGCAGCAAGGA |
| | | AACGTATTCTCATGCTCAGTAATGCACGAGGCCCTCCATAATCATTACACGCAGAAATCATTA |
| | | AGCTTATCGCCGGGT |
| 1376 | HC Ab32 | GAAGTGCAGCTGCTGGAAAGCGGCGGCGGCGTGGTGCAGCCGGGCCGTAGCCTGCGTCTGAGC |
| | | TGCGCGGCGAGCGGCTTTACCTTTAGCAGCTATGCGatgCATTGGGTGCGTCAGGCGCCGGGC |
| | | AAAGGCCTGGAATGGGTGGCGGTGATTAGCTATGATGGCAGCAACAAATATTATGCGGATAGC |
| | | GTGAAAGGCCGTTTTACCATTAGCCGTGATAACAGCAAAAACACCCTGAGCCTGCAGatgAAC |
| | | AGCCTGCGTGTGGAAGATACCGCGATTTATTATTGCGTGCGTGGCGCGGGCCTGGGCTTTACC |
| | | TATGGCCCGGATGGCTTTGATATTTGGGGCCAGGGCACCatgGTGACCGTGAGCAGCAAGGGA |
| | | CCCTCGGTGTTCCCTCTCGCCCCCTCATCGAGGAGCACGTCCGAATCGACTGCGGCGCTGGGA |
| | | TGTCTCGTGAAGGACTACTTCCCCGAGCCCGTGACCGTGTCATGGAACTCAGGCGCATTGACC |
| | | TCGGGAGTGCACACGTTCCCGGCAGTGTTGCAGTCGTCGGGCCTTTACTCGCTGTCGTCCGTG |
| | | GTCACGGTGCCTTCGTCGAATTTCGGGACGCAGACTTACACATGTAATGTGGATCACAAACCG |
| | | TCCAATACCAAGGTCGATAAGACGGTCGAAAGGAAATGCTGCGTGGAATGTCCTCCCTGCCCA |
| | | GCACCGCCAGTCGCGGGTCCCAGCGTCTTTTTGTTCCCACCGAAGCCCAAGGACACACTGATG |
| | | ATCAGCCGTACGCCGGAGGTAACATGCGTAGTGGTAGATGTCTCGCATGAGGACCCTGAAGTG |
| | | CAGTTCAATTGGTATGTAGACGGCGTGGAGGTGCACAACGCCAAGACCAAGCCACGAGAAGAA |
| | | CAGTTCAACTCGACTTTTAGAGTGGTATCCGTCCTGACCGTCGTGCACCAGGACTGGCTCAAT |
| | | GGAAAGGAGTACAAATGCAAGGTATCCAACAAGGGGTTGCCAGCTCCAATCGAAAAGACCATC |
| | | TCAAAGACAAAGGGGCAGCCCAGAGAGCCCCAAGTGTATACGCTTCCACCCTCAAGGGAGGAG |
| | | ATGACAAAGAATCAGGTATCACTCACATGTTTGGTGAAAGGGTTTTATCCGAGCGATATTGCG |
| | | GTCGAGTGGGAAAGCAACGGTCAACCGGAGAACAACTATAAGACGACTCCCCCTATGCTGGAC |
| | | AGCGACGGGTCGTTCTTTCTGTATTCCAAACTCACGGTGGACAAATCGAGGTGGCAGCAAGGA |
| | | AACGTATTCTCATGCTCAGTAATGCACGAGGCCCTCCATAATCATTACACGCAGAAATCATTA |
| | | AGCTTATCGCCGGGT |
| 1377 | HC Ab33 | GAAGTGCAGCTGCTGGAAAGCGGCGGCGGCGTGGTGCAGCCGGGCCGTAGCCTGCGTCTGAGC |
| | | TGCGCGGCGAGCGGCTTTACCTTTAGCAGCTATGCGatgCATTGGGTGCGTCAGGCGCCGGGC |
| | | AAAGGCCTGGAATGGGTGGCGGTGATTAGCTATGATGGCAGCAACAAATATTATGCGGATAGC |
| | | GTGAAAGGCCGTTTTACCATTAGCCGTGATAACAGCAAAAACACCCTGAGCCTGCAGatgAAC |
| | | AGCCTGCGTGTGGAAGATACCGCGATTTATTATTGCGTGCGTGGCGCGGGCCAGGGCCTGAGC |
| | | TATGGCCCGGATGGCTTTGATATTTGGGGCCAGGGCACCatgGTGACCGTGAGCAGCAAGGGA |
| | | CCCTCGGTGTTCCCTCTCGCCCCCTCATCGAGGAGCACGTCCGAATCGACTGCGGCGCTGGGA |
| | | TGTCTCGTGAAGGACTACTTCCCCGAGCCCGTGACCGTGTCATGGAACTCAGGCGCATTGACC |
| | | TCGGGAGTGCACACGTTCCCGGCAGTGTTGCAGTCGTCGGGCCTTTACTCGCTGTCGTCCGTG |
| | | GTCACGGTGCCTTCGTCGAATTTCGGGACGCAGACTTACACATGTAATGTGGATCACAAACCG |
| | | TCCAATACCAAGGTCGATAAGACGGTCGAAAGGAAATGCTGCGTGGAATGTCCTCCCTGCCCA |
| | | GCACCGCCAGTCGCGGGTCCCAGCGTCTTTTTGTTCCCACCGAAGCCCAAGGACACACTGATG |
| | | ATCAGCCGTACGCCGGAGGTAACATGCGTAGTGGTAGATGTCTCGCATGAGGACCCTGAAGTG |
| | | CAGTTCAATTGGTATGTAGACGGCGTGGAGGTGCACAACGCCAAGACCAAGCCACGAGAAGAA |
| | | CAGTTCAACTCGACTTTTAGAGTGGTATCCGTCCTGACCGTCGTGCACCAGGACTGGCTCAAT |
| | | GGAAAGGAGTACAAATGCAAGGTATCCAACAAGGGGTTGCCAGCTCCAATCGAAAAGACCATC |
| | | TCAAAGACAAAGGGGCAGCCCAGAGAGCCCCAAGTGTATACGCTTCCACCCTCAAGGGAGGAG |
| | | ATGACAAAGAATCAGGTATCACTCACATGTTTGGTGAAAGGGTTTTATCCGAGCGATATTGCG |
| | | GTCGAGTGGGAAAGCAACGGTCAACCGGAGAACAACTATAAGACGACTCCCCCTATGCTGGAC |
| | | AGCGACGGGTCGTTCTTTCTGTATTCCAAACTCACGGTGGACAAATCGAGGTGGCAGCAAGGA |
| | | AACGTATTCTCATGCTCAGTAATGCACGAGGCCCTCCATAATCATTACACGCAGAAATCATTA |
| | | AGCTTATCGCCGGGT |
| 1378 | HC Ab34 | GAAGTGCAGCTGCTGGAAAGCGGCGGCGGCGTGGTGCAGCCGGGCCGTAGCCTGCGTCTGAGC |
| | | TGCGCGGCGAGCGGCTTTACCTTTAGCAGCTATGCGatgCATTGGGTGCGTCAGGCGCCGGGC |
| | | AAAGGCCTGGAATGGGTGGCGGTGATTAGCTATGATGGCAGCAACAAATATTATGCGGATAGC |
| | | GTGAAAGGCCGTTTTACCATTAGCCGTGATAACAGCAAAAACACCCTGAGCCTGCAGatgAAC |
| | | AGCCTGCGTGTGGAAGATACCGCGATTTATTATTGCGTGCGTGGCGCGGGCCGTGGCTATACC |
| | | CGTGGCCCGGATGGCTTTGATATTTGGGGCCAGGGCACCatgGTGACCGTGAGCAGCAAGGGA |
| | | CCCTCGGTGTTCCCTCTCGCCCCCTCATCGAGGAGCACGTCCGAATCGACTGCGGCGCTGGGA |
| | | TGTCTCGTGAAGGACTACTTCCCCGAGCCCGTGACCGTGTCATGGAACTCAGGCGCATTGACC |
| | | TCGGGAGTGCACACGTTCCCGGCAGTGTTGCAGTCGTCGGGCCTTTACTCGCTGTCGTCCGTG |
| | | GTCACGGTGCCTTCGTCGAATTTCGGGACGCAGACTTACACATGTAATGTGGATCACAAACCG |
| | | TCCAATACCAAGGTCGATAAGACGGTCGAAAGGAAATGCTGCGTGGAATGTCCTCCCTGCCCA |
| | | GCACCGCCAGTCGCGGGTCCCAGCGTCTTTTTGTTCCCACCGAAGCCCAAGGACACACTGATG |
| | | ATCAGCCGTACGCCGGAGGTAACATGCGTAGTGGTAGATGTCTCGCATGAGGACCCTGAAGTG |
| | | CAGTTCAATTGGTATGTAGACGGCGTGGAGGTGCACAACGCCAAGACCAAGCCACGAGAAGAA |
| | | CAGTTCAACTCGACTTTTAGAGTGGTATCCGTCCTGACCGTCGTGCACCAGGACTGGCTCAAT |
| | | GGAAAGGAGTACAAATGCAAGGTATCCAACAAGGGGTTGCCAGCTCCAATCGAAAAGACCATC |
| | | TCAAAGACAAAGGGGCAGCCCAGAGAGCCCCAAGTGTATACGCTTCCACCCTCAAGGGAGGAG |
| | | ATGACAAAGAATCAGGTATCACTCACATGTTTGGTGAAAGGGTTTTATCCGAGCGATATTGCG |
| | | GTCGAGTGGGAAAGCAACGGTCAACCGGAGAACAACTATAAGACGACTCCCCCTATGCTGGAC |
| | | AGCGACGGGTCGTTCTTTCTGTATTCCAAACTCACGGTGGACAAATCGAGGTGGCAGCAAGGA |
| | | AACGTATTCTCATGCTCAGTAATGCACGAGGCCCTCCATAATCATTACACGCAGAAATCATTA |
| | | AGCTTATCGCCGGGT |
| 1379 | HC Ab35 | GAAGTGCAGCTGCTGGAAAGCGGCGGCGGCGTGGTGCAGCCGGGCCGTAGCCTGCGTCTGAGC |
| | | TGCGCGGCGAGCGGCTTTACCTTTAGCAGCTATGCGatgCATTGGGTGCGTCAGGCGCCGGGC |
| | | AAAGGCCTGGAATGGGTGGCGGTGATTAGCTATGATGGCAGCAACAAATATTATGCGGATAGC |
| | | GTGAAAGGCCGTTTTACCATTAGCCGTGATAACAGCAAAAACACCCTGAGCCTGCAGatgAAC |
| | | AGCCTGCGTGTGGAAGATACCGCGATTTATTATTGCGTGCGTGGCGCGGGCCGTGGCTATACC |
| | | AACGGCCCGGATGGCTTTGATATTTGGGGCCAGGGCACCatgGTGACCGTGAGCAGCAAGGGA |
| | | CCCTCGGTGTTCCCTCTCGCCCCCTCATCGAGGAGCACGTCCGAATCGACTGCGGCGCTGGGA |
| | | TGTCTCGTGAAGGACTACTTCCCCGAGCCCGTGACCGTGTCATGGAACTCAGGCGCATTGACC |
| | | TCGGGAGTGCACACGTTCCCGGCAGTGTTGCAGTCGTCGGGCCTTTACTCGCTGTCGTCCGTG |
| | | GTCACGGTGCCTTCGTCGAATTTCGGGACGCAGACTTACACATGTAATGTGGATCACAAACCG |
| | | TCCAATACCAAGGTCGATAAGACGGTCGAAAGGAAATGCTGCGTGGAATGTCCTCCCTGCCCA |
| | | GCACCGCCAGTCGCGGGTCCCAGCGTCTTTTTGTTCCCACCGAAGCCCAAGGACACACTGATG |
| | | ATCAGCCGTACGCCGGAGGTAACATGCGTAGTGGTAGATGTCTCGCATGAGGACCCTGAAGTG |
| | | CAGTTCAATTGGTATGTAGACGGCGTGGAGGTGCACAACGCCAAGACCAAGCCACGAGAAGAA |
| | | CAGTTCAACTCGACTTTTAGAGTGGTATCCGTCCTGACCGTCGTGCACCAGGACTGGCTCAAT |
| | | GGAAAGGAGTACAAATGCAAGGTATCCAACAAGGGGTTGCCAGCTCCAATCGAAAAGACCATC |
| | | TCAAAGACAAAGGGGCAGCCCAGAGAGCCCCAAGTGTATACGCTTCCACCCTCAAGGGAGGAG |
| | | ATGACAAAGAATCAGGTATCACTCACATGTTTGGTGAAAGGGTTTTATCCGAGCGATATTGCG |
| | | GTCGAGTGGGAAAGCAACGGTCAACCGGAGAACAACTATAAGACGACTCCCCCTATGCTGGAC |
| | | AGCGACGGGTCGTTCTTTCTGTATTCCAAACTCACGGTGGACAAATCGAGGTGGCAGCAAGGA |
| | | AACGTATTCTCATGCTCAGTAATGCACGAGGCCCTCCATAATCATTACACGCAGAAATCATTA |
| | | AGCTTATCGCCGGGT |
| 1380 | HC Ab36 | GAAGTGCAGCTGCTGGAAAGCGGCGGCGGCGTGGTGCAGCCGGGCCGTAGCCTGCGTCTGAGC |
| | | TGCGCGGCGAGCGGCTTTACCTTTAGCAGCTATGCGatgCATTGGGTGCGTCAGGCGCCGGGC |
| | | AAAGGCCTGGAATGGGTGGCGGTGATTAGCTATGATGGCAGCAACAAATATTATGCGGATAGC |
| | | GTGAAAGGCCGTTTTACCATTAGCCGTGATAACAGCAAAAACACCCTGAGCCTGCAGatgAAC |
| | | AGCCTGCGTGTGGAAGATACCGCGATTTATTATTGCGTGCGTGGCGCGGGCCGTGGCTTTACC |
| | | TATGGCCCGGATGGCTTTGATATTTGGGGCCAGGGCACCatgGTGACCGTGAGCAGCAAGGGA |
| | | CCCTCGGTGTTCCCTCTCGCCCCCTCATCGAGGAGCACGTCCGAATCGACTGCGGCGCTGGGA |
| | | TGTCTCGTGAAGGACTACTTCCCCGAGCCCGTGACCGTGTCATGGAACTCAGGCGCATTGACC |
| | | TCGGGAGTGCACACGTTCCCGGCAGTGTTGCAGTCGTCGGGCCTTTACTCGCTGTCGTCCGTG |
| | | GTCACGGTGCCTTCGTCGAATTTCGGGACGCAGACTTACACATGTAATGTGGATCACAAACCG |
| | | TCCAATACCAAGGTCGATAAGACGGTCGAAAGGAAATGCTGCGTGGAATGTCCTCCCTGCCCA |
| | | GCACCGCCAGTCGCGGGTCCCAGCGTCTTTTTGTTCCCACCGAAGCCCAAGGACACACTGATG |
| | | ATCAGCCGTACGCCGGAGGTAACATGCGTAGTGGTAGATGTCTCGCATGAGGACCCTGAAGTG |
| | | CAGTTCAATTGGTATGTAGACGGCGTGGAGGTGCACAACGCCAAGACCAAGCCACGAGAAGAA |
| | | CAGTTCAACTCGACTTTTAGAGTGGTATCCGTCCTGACCGTCGTGCACCAGGACTGGCTCAAT |
| | | GGAAAGGAGTACAAATGCAAGGTATCCAACAAGGGGTTGCCAGCTCCAATCGAAAAGACCATC |
| | | TCAAAGACAAAGGGGCAGCCCAGAGAGCCCCAAGTGTATACGCTTCCACCCTCAAGGGAGGAG |
| | | ATGACAAAGAATCAGGTATCACTCACATGTTTGGTGAAAGGGTTTTATCCGAGCGATATTGCG |
| | | GTCGAGTGGGAAAGCAACGGTCAACCGGAGAACAACTATAAGACGACTCCCCCTATGCTGGAC |
| | | AGCGACGGGTCGTTCTTTCTGTATTCCAAACTCACGGTGGACAAATCGAGGTGGCAGCAAGGA |
| | | AACGTATTCTCATGCTCAGTAATGCACGAGGCCCTCCATAATCATTACACGCAGAAATCATTA |
| | | AGCTTATCGCCGGGT |
| 1381 | HC Ab37 | GAAGTGCAGCTGCTGGAAAGCGGCGGCGGCGTGGTGCAGCCGGGCCGTAGCCTGCGTCTGAGC |
| | | TGCGCGGCGAGCGGCTTTACCTTTAGCAGCTATGCGatgCATTGGGTGCGTCAGGCGCCGGGC |
| | | AAAGGCCTGGAATGGGTGGCGGTGATTAGCTATGATGGCAGCAACAAATATTATGCGGATAGC |
| | | GTGAAAGGCCGTTTTACCATTAGCCGTGATAACAGCAAAAACACCCTGAGCCTGCAGatgAAC |
| | | AGCCTGCGTGTGGAAGATACCGCGATTTATTATTGCGTGCGTGGCGCGGGCCGTGGCCTGACC |
| | | TATGGCCCGGATGGCTTTGATATTTGGGGCCAGGGCACCatgGTGACCGTGAGCAGCAAGGGA |
| | | CCCTCGGTGTTCCCTCTCGCCCCCTCATCGAGGAGCACGTCCGAATCGACTGCGGCGCTGGGA |
| | | TGTCTCGTGAAGGACTACTTCCCCGAGCCCGTGACCGTGTCATGGAACTCAGGCGCATTGACC |
| | | TCGGGAGTGCACACGTTCCCGGCAGTGTTGCAGTCGTCGGGCCTTTACTCGCTGTCGTCCGTG |
| | | GTCACGGTGCCTTCGTCGAATTTCGGGACGCAGACTTACACATGTAATGTGGATCACAAACCG |
| | | TCCAATACCAAGGTCGATAAGACGGTCGAAAGGAAATGCTGCGTGGAATGTCCTCCCTGCCCA |
| | | GCACCGCCAGTCGCGGGTCCCAGCGTCTTTTTGTTCCCACCGAAGCCCAAGGACACACTGATG |
| | | ATCAGCCGTACGCCGGAGGTAACATGCGTAGTGGTAGATGTCTCGCATGAGGACCCTGAAGTG |
| | | CAGTTCAATTGGTATGTAGACGGCGTGGAGGTGCACAACGCCAAGACCAAGCCACGAGAAGAA |
| | | CAGTTCAACTCGACTTTTAGAGTGGTATCCGTCCTGACCGTCGTGCACCAGGACTGGCTCAAT |
| | | GGAAAGGAGTACAAATGCAAGGTATCCAACAAGGGGTTGCCAGCTCCAATCGAAAAGACCATC |
| | | TCAAAGACAAAGGGGCAGCCCAGAGAGCCCCAAGTGTATACGCTTCCACCCTCAAGGGAGGAG |
| | | ATGACAAAGAATCAGGTATCACTCACATGTTTGGTGAAAGGGTTTTATCCGAGCGATATTGCG |
| | | GTCGAGTGGGAAAGCAACGGTCAACCGGAGAACAACTATAAGACGACTCCCCCTATGCTGGAC |
| | | AGCGACGGGTCGTTCTTTCTGTATTCCAAACTCACGGTGGACAAATCGAGGTGGCAGCAAGGA |
| | | AACGTATTCTCATGCTCAGTAATGCACGAGGCCCTCCATAATCATTACACGCAGAAATCATTA |
| | | AGCTTATCGCCGGGT |
| 1382 | HC Ab38 | GAAGTGCAGCTGCTGGAAAGCGGCGGCGGCGTGGTGCAGCCGGGCCGTAGCCTGCGTCTGAGC |
| | | TGCGCGGCGAGCGGCTTTACCTTTAGCAGCTATGCGatgCATTGGGTGCGTCAGGCGCCGGGC |
| | | AAAGGCCTGGAATGGGTGGCGGTGATTAGCTATGATGGCAGCAACAAATATTATGCGGATAGC |
| | | GTGAAAGGCCGTTTTACCATTAGCCGTGATAACAGCAAAAACACCCTGAGCCTGCAGatgAAC |
| | | AGCCTGCGTGTGGAAGATACCGCGATTTATTATTGCGTGCGTGGCGCGGGCCAGGGCTATCCG |
| | | TATGGCCCGGATGGCTTTGATATTTGGGGCCAGGGCACCatgGTGACCGTGAGCAGCAAGGGA |
| | | CCCTCGGTGTTCCCTCTCGCCCCCTCATCGAGGAGCACGTCCGAATCGACTGCGGCGCTGGGA |
| | | TGTCTCGTGAAGGACTACTTCCCCGAGCCCGTGACCGTGTCATGGAACTCAGGCGCATTGACC |
| | | TCGGGAGTGCACACGTTCCCGGCAGTGTTGCAGTCGTCGGGCCTTTACTCGCTGTCGTCCGTG |
| | | GTCACGGTGCCTTCGTCGAATTTCGGGACGCAGACTTACACATGTAATGTGGATCACAAACCG |
| | | TCCAATACCAAGGTCGATAAGACGGTCGAAAGGAAATGCTGCGTGGAATGTCCTCCCTGCCCA |
| | | GCACCGCCAGTCGCGGGTCCCAGCGTCTTTTTGTTCCCACCGAAGCCCAAGGACACACTGATG |
| | | ATCAGCCGTACGCCGGAGGTAACATGCGTAGTGGTAGATGTCTCGCATGAGGACCCTGAAGTG |
| | | CAGTTCAATTGGTATGTAGACGGCGTGGAGGTGCACAACGCCAAGACCAAGCCACGAGAAGAA |
| | | CAGTTCAACTCGACTTTTAGAGTGGTATCCGTCCTGACCGTCGTGCACCAGGACTGGCTCAAT |
| | | GGAAAGGAGTACAAATGCAAGGTATCCAACAAGGGGTTGCCAGCTCCAATCGAAAAGACCATC |
| | | TCAAAGACAAAGGGGCAGCCCAGAGAGCCCCAAGTGTATACGCTTCCACCCTCAAGGGAGGAG |
| | | ATGACAAAGAATCAGGTATCACTCACATGTTTGGTGAAAGGGTTTTATCCGAGCGATATTGCG |
| | | GTCGAGTGGGAAAGCAACGGTCAACCGGAGAACAACTATAAGACGACTCCCCCTATGCTGGAC |
| | | AGCGACGGGTCGTTCTTTCTGTATTCCAAACTCACGGTGGACAAATCGAGGTGGCAGCAAGGA |
| | | AACGTATTCTCATGCTCAGTAATGCACGAGGCCCTCCATAATCATTACACGCAGAAATCATTA |
| | | AGCTTATCGCCGGGT |
| 1383 | HC Ab39 | GAAGTGCAGCTGCTGGAAAGCGGCGGCGGCGTGGTGCAGCCGGGCCGTAGCCTGCGTCTGAGC |
| | | TGCGCGGCGAGCGGCTTTACCTTTAGCAGCTATGCGatgCATTGGGTGCGTCAGGCGCCGGGC |
| | | AAAGGCCTGGAATGGGTGGCGGTGATTAGCTATGATGGCAGCAACAAATATTATGCGGATAGC |
| | | GTGAAAGGCCGTTTTACCATTAGCCGTGATAACAGCAAAAACACCCTGAGCCTGCAGatgAAC |
| | | AGCCTGCGTGTGGAAGATACCGCGATTTATTATTGCGTGCGTGGCGCGGGCACCGGCTTTACC |
| | | TATGGCCCGGATGGCTTTGATATTTGGGGCCAGGGCACCatgGTGACCGTGAGCAGCAAGGGA |
| | | CCCTCGGTGTTCCCTCTCGCCCCCTCATCGAGGAGCACGTCCGAATCGACTGCGGCGCTGGGA |
| | | TGTCTCGTGAAGGACTACTTCCCCGAGCCCGTGACCGTGTCATGGAACTCAGGCGCATTGACC |
| | | TCGGGAGTGCACACGTTCCCGGCAGTGTTGCAGTCGTCGGGCCTTTACTCGCTGTCGTCCGTG |
| | | GTCACGGTGCCTTCGTCGAATTTCGGGACGCAGACTTACACATGTAATGTGGATCACAAACCG |
| | | TCCAATACCAAGGTCGATAAGACGGTCGAAAGGAAATGCTGCGTGGAATGTCCTCCCTGCCCA |
| | | GCACCGCCAGTCGCGGGTCCCAGCGTCTTTTTGTTCCCACCGAAGCCCAAGGACACACTGATG |
| | | ATCAGCCGTACGCCGGAGGTAACATGCGTAGTGGTAGATGTCTCGCATGAGGACCCTGAAGTG |
| | | CAGTTCAATTGGTATGTAGACGGCGTGGAGGTGCACAACGCCAAGACCAAGCCACGAGAAGAA |
| | | CAGTTCAACTCGACTTTTAGAGTGGTATCCGTCCTGACCGTCGTGCACCAGGACTGGCTCAAT |
| | | GGAAAGGAGTACAAATGCAAGGTATCCAACAAGGGGTTGCCAGCTCCAATCGAAAAGACCATC |
| | | TCAAAGACAAAGGGGCAGCCCAGAGAGCCCCAAGTGTATACGCTTCCACCCTCAAGGGAGGAG |
| | | ATGACAAAGAATCAGGTATCACTCACATGTTTGGTGAAAGGGTTTTATCCGAGCGATATTGCG |
| | | GTCGAGTGGGAAAGCAACGGTCAACCGGAGAACAACTATAAGACGACTCCCCCTATGCTGGAC |
| | | AGCGACGGGTCGTTCTTTCTGTATTCCAAACTCACGGTGGACAAATCGAGGTGGCAGCAAGGA |
| | | AACGTATTCTCATGCTCAGTAATGCACGAGGCCCTCCATAATCATTACACGCAGAAATCATTA |
| | | AGCTTATCGCCGGGT |
| 1384 | HC Ab40 | GAAGTGCAGCTGCTGGAAAGCGGCGGCGGCGTGGTGCAGCCGGGCCGTAGCCTGCGTCTGAGC |
| | | TGCGCGGCGAGCGGCTTTACCTTTAGCAGCTATGCGatgCATTGGGTGCGTCAGGCGCCGGGC |
| | | AAAGGCCTGGAATGGGTGGCGGTGATTAGCTATGATGGCAGCAACAAATATTATGCGGATAGC |
| | | GTGAAAGGCCGTTTTACCATTAGCCGTGATAACAGCAAAAACACCCTGAGCCTGCAGatgAAC |
| | | AGCCTGCGTGTGGAAGATACCGCGATTTATTATTGCGTGCGTGGCGCGGGCatgGGCCTGACC |
| | | TATGGCCCGGATGGCTTTGATATTTGGGGCCAGGGCACCatgGTGACCGTGAGCAGCAAGGGA |
| | | CCCTCGGTGTTCCCTCTCGCCCCCTCATCGAGGAGCACGTCCGAATCGACTGCGGCGCTGGGA |
| | | TGTCTCGTGAAGGACTACTTCCCCGAGCCCGTGACCGTGTCATGGAACTCAGGCGCATTGACC |
| | | TCGGGAGTGCACACGTTCCCGGCAGTGTTGCAGTCGTCGGGCCTTTACTCGCTGTCGTCCGTG |
| | | GTCACGGTGCCTTCGTCGAATTTCGGGACGCAGACTTACACATGTAATGTGGATCACAAACCG |
| | | TCCAATACCAAGGTCGATAAGACGGTCGAAAGGAAATGCTGCGTGGAATGTCCTCCCTGCCCA |
| | | GCACCGCCAGTCGCGGGTCCCAGCGTCTTTTTGTTCCCACCGAAGCCCAAGGACACACTGATG |
| | | ATCAGCCGTACGCCGGAGGTAACATGCGTAGTGGTAGATGTCTCGCATGAGGACCCTGAAGTG |
| | | CAGTTCAATTGGTATGTAGACGGCGTGGAGGTGCACAACGCCAAGACCAAGCCACGAGAAGAA |
| | | CAGTTCAACTCGACTTTTAGAGTGGTATCCGTCCTGACCGTCGTGCACCAGGACTGGCTCAAT |
| | | GGAAAGGAGTACAAATGCAAGGTATCCAACAAGGGGTTGCCAGCTCCAATCGAAAAGACCATC |
| | | TCAAAGACAAAGGGGCAGCCCAGAGAGCCCCAAGTGTATACGCTTCCACCCTCAAGGGAGGAG |
| | | ATGACAAAGAATCAGGTATCACTCACATGTTTGGTGAAAGGGTTTTATCCGAGCGATATTGCG |
| | | GTCGAGTGGGAAAGCAACGGTCAACCGGAGAACAACTATAAGACGACTCCCCCTATGCTGGAC |
| | | AGCGACGGGTCGTTCTTTCTGTATTCCAAACTCACGGTGGACAAATCGAGGTGGCAGCAAGGA |
| | | AACGTATTCTCATGCTCAGTAATGCACGAGGCCCTCCATAATCATTACACGCAGAAATCATTA |
| | | AGCTTATCGCCGGGT |
| 1385 | HC Ab41 | GAAGTGCAGCTGCTGGAAAGCGGCGGCGGCGTGGTGCAGCCGGGCCGTAGCCTGCGTCTGAGC |
| | | TGCGCGGCGAGCGGCTTTACCTTTAGCAGCTATGCGatgCATTGGGTGCGTCAGGCGCCGGGC |
| | | AAAGGCCTGGAATGGGTGGCGGTGATTAGCTATGATGGCAGCAACAAATATTATGCGGATAGC |
| | | GTGAAAGGCCGTTTTACCATTAGCCGTGATAACAGCAAAAACACCCTGAGCCTGCAGatgAAC |
| | | AGCCTGCGTGTGGAAGATACCGCGATTTATTATTGCGTGCGTGGCGCGGGCCTGGGCTTTCCG |
| | | TATGGCCCGGATGGCTTTGATATTTGGGGCCAGGGCACCatgGTGACCGTGAGCAGCAAGGGA |
| | | CCCTCGGTGTTCCCTCTCGCCCCCTCATCGAGGAGCACGTCCGAATCGACTGCGGCGCTGGGA |
| | | TGTCTCGTGAAGGACTACTTCCCCGAGCCCGTGACCGTGTCATGGAACTCAGGCGCATTGACC |
| | | TCGGGAGTGCACACGTTCCCGGCAGTGTTGCAGTCGTCGGGCCTTTACTCGCTGTCGTCCGTG |
| | | GTCACGGTGCCTTCGTCGAATTTCGGGACGCAGACTTACACATGTAATGTGGATCACAAACCG |
| | | TCCAATACCAAGGTCGATAAGACGGTCGAAAGGAAATGCTGCGTGGAATGTCCTCCCTGCCCA |
| | | GCACCGCCAGTCGCGGGTCCCAGCGTCTTTTTGTTCCCACCGAAGCCCAAGGACACACTGATG |
| | | ATCAGCCGTACGCCGGAGGTAACATGCGTAGTGGTAGATGTCTCGCATGAGGACCCTGAAGTG |
| | | CAGTTCAATTGGTATGTAGACGGCGTGGAGGTGCACAACGCCAAGACCAAGCCACGAGAAGAA |
| | | CAGTTCAACTCGACTTTTAGAGTGGTATCCGTCCTGACCGTCGTGCACCAGGACTGGCTCAAT |
| | | GGAAAGGAGTACAAATGCAAGGTATCCAACAAGGGGTTGCCAGCTCCAATCGAAAAGACCATC |
| | | TCAAAGACAAAGGGGCAGCCCAGAGAGCCCCAAGTGTATACGCTTCCACCCTCAAGGGAGGAG |
| | | ATGACAAAGAATCAGGTATCACTCACATGTTTGGTGAAAGGGTTTTATCCGAGCGATATTGCG |
| | | GTCGAGTGGGAAAGCAACGGTCAACCGGAGAACAACTATAAGACGACTCCCCCTATGCTGGAC |
| | | AGCGACGGGTCGTTCTTTCTGTATTCCAAACTCACGGTGGACAAATCGAGGTGGCAGCAAGGA |
| | | AACGTATTCTCATGCTCAGTAATGCACGAGGCCCTCCATAATCATTACACGCAGAAATCATTA |
| | | AGCTTATCGCCGGGT |
| 1386 | HC Ab42 | GAAGTGCAGCTGCTGGAAAGCGGCGGCGGCGTGGTGCAGCCGGGCCGTAGCCTGCGTCTGAGC |
| | | TGCGCGGCGAGCGGCTTTACCTTTAGCAGCTATGCGatgCATTGGGTGCGTCAGGCGCCGGGC |
| | | AAAGGCCTGGAATGGGTGGCGGTGATTAGCTATGATGGCAGCAACAAATATTATGCGGATAGC |
| | | GTGAAAGGCCGTTTTACCATTAGCCGTGATAACAGCAAAAACACCCTGAGCCTGCAGatgAAC |
| | | AGCCTGCGTGTGGAAGATACCGCGATTTATTATTGCGTGCGTGGCGCGGGCCTGGGCTGGGCG |
| | | TATGGCCCGGATGGCTTTGATATTTGGGGCCAGGGCACCatgGTGACCGTGAGCAGCAAGGGA |
| | | CCCTCGGTGTTCCCTCTCGCCCCCTCATCGAGGAGCACGTCCGAATCGACTGCGGCGCTGGGA |
| | | TGTCTCGTGAAGGACTACTTCCCCGAGCCCGTGACCGTGTCATGGAACTCAGGCGCATTGACC |
| | | TCGGGAGTGCACACGTTCCCGGCAGTGTTGCAGTCGTCGGGCCTTTACTCGCTGTCGTCCGTG |
| | | GTCACGGTGCCTTCGTCGAATTTCGGGACGCAGACTTACACATGTAATGTGGATCACAAACCG |
| | | TCCAATACCAAGGTCGATAAGACGGTCGAAAGGAAATGCTGCGTGGAATGTCCTCCCTGCCCA |
| | | GCACCGCCAGTCGCGGGTCCCAGCGTCTTTTTGTTCCCACCGAAGCCCAAGGACACACTGATG |
| | | ATCAGCCGTACGCCGGAGGTAACATGCGTAGTGGTAGATGTCTCGCATGAGGACCCTGAAGTG |
| | | CAGTTCAATTGGTATGTAGACGGCGTGGAGGTGCACAACGCCAAGACCAAGCCACGAGAAGAA |
| | | CAGTTCAACTCGACTTTTAGAGTGGTATCCGTCCTGACCGTCGTGCACCAGGACTGGCTCAAT |
| | | GGAAAGGAGTACAAATGCAAGGTATCCAACAAGGGGTTGCCAGCTCCAATCGAAAAGACCATC |
| | | TCAAAGACAAAGGGGCAGCCCAGAGAGCCCCAAGTGTATACGCTTCCACCCTCAAGGGAGGAG |
| | | ATGACAAAGAATCAGGTATCACTCACATGTTTGGTGAAAGGGTTTTATCCGAGCGATATTGCG |
| | | GTCGAGTGGGAAAGCAACGGTCAACCGGAGAACAACTATAAGACGACTCCCCCTATGCTGGAC |
| | | AGCGACGGGTCGTTCTTTCTGTATTCCAAACTCACGGTGGACAAATCGAGGTGGCAGCAAGGA |
| | | AACGTATTCTCATGCTCAGTAATGCACGAGGCCCTCCATAATCATTACACGCAGAAATCATTA |
| | | AGCTTATCGCCGGGT |
| 1387 | HC Ab43 | GAAGTGCAGCTGCTGGAAAGCGGCGGCGGCGTGGTGCAGCCGGGCCGTAGCCTGCGTCTGAGC |
| | | TGCGCGGCGAGCGGCTTTACCTTTAGCAGCTATGCGatgCATTGGGTGCGTCAGGCGCCGGGC |
| | | AAAGGCCTGGAATGGGTGGCGGTGATTAGCTATGATGGCAGCAACAAATATTATGCGGATAGC |
| | | GTGAAAGGCCGTTTTACCATTAGCCGTGATAACAGCAAAAACACCCTGAGCCTGCAGatgAAC |
| | | AGCCTGCGTGTGGAAGATACCGCGATTTATTATTGCGTGCGTGGCGCGGGCCGTGGCTATCCG |
| | | TATGGCCCGGATGGCTTTGATATTTGGGGCCAGGGCACCatgGTGACCGTGAGCAGCAAGGGA |
| | | CCCTCGGTGTTCCCTCTCGCCCCCTCATCGAGGAGCACGTCCGAATCGACTGCGGCGCTGGGA |
| | | TGTCTCGTGAAGGACTACTTCCCCGAGCCCGTGACCGTGTCATGGAACTCAGGCGCATTGACC |
| | | TCGGGAGTGCACACGTTCCCGGCAGTGTTGCAGTCGTCGGGCCTTTACTCGCTGTCGTCCGTG |
| | | GTCACGGTGCCTTCGTCGAATTTCGGGACGCAGACTTACACATGTAATGTGGATCACAAACCG |
| | | TCCAATACCAAGGTCGATAAGACGGTCGAAAGGAAATGCTGCGTGGAATGTCCTCCCTGCCCA |
| | | GCACCGCCAGTCGCGGGTCCCAGCGTCTTTTTGTTCCCACCGAAGCCCAAGGACACACTGATG |
| | | ATCAGCCGTACGCCGGAGGTAACATGCGTAGTGGTAGATGTCTCGCATGAGGACCCTGAAGTG |
| | | CAGTTCAATTGGTATGTAGACGGCGTGGAGGTGCACAACGCCAAGACCAAGCCACGAGAAGAA |
| | | CAGTTCAACTCGACTTTTAGAGTGGTATCCGTCCTGACCGTCGTGCACCAGGACTGGCTCAAT |
| | | GGAAAGGAGTACAAATGCAAGGTATCCAACAAGGGGTTGCCAGCTCCAATCGAAAAGACCATC |
| | | TCAAAGACAAAGGGGCAGCCCAGAGAGCCCCAAGTGTATACGCTTCCACCCTCAAGGGAGGAG |
| | | ATGACAAAGAATCAGGTATCACTCACATGTTTGGTGAAAGGGTTTTATCCGAGCGATATTGCG |
| | | GTCGAGTGGGAAAGCAACGGTCAACCGGAGAACAACTATAAGACGACTCCCCCTATGCTGGAC |
| | | AGCGACGGGTCGTTCTTTCTGTATTCCAAACTCACGGTGGACAAATCGAGGTGGCAGCAAGGA |
| | | AACGTATTCTCATGCTCAGTAATGCACGAGGCCCTCCATAATCATTACACGCAGAAATCATTA |
| | | AGCTTATCGCCGGGT |
| 1388 | HC Ab44 | GAAGTGCAGCTGCTGGAAAGCGGCGGCGGCGTGGTGCAGCCGGGCCGTAGCCTGCGTCTGAGC |
| | | TGCGCGGCGAGCGGCTTTGATTTTGCGGGCTATGCGatgCATTGGGTGCGTCAGGCGCCGGGC |
| | | AAAGGCCTGGAATGGGTGGCGGTGATTAGCTATGATGGCAGCAACAAATATTATGCGGATAGC |
| | | GTGAAAGGCCGTTTTACCATTAGCCGTGATAACAGCAAAAACACCCTGAGCCTGCAGatgAAC |
| | | AGCCTGCGTGTGGAAGATACCGCGATTTATTATTGCGTGCGTGGCGCGGGCCGTGGCCTGACC |
| | | TATGGCCCGGATGGCTTTGATATTTGGGGCCAGGGCACCatgGTGACCGTGAGCAGCAAGGGA |
| | | CCCTCGGTGTTCCCTCTCGCCCCCTCATCGAGGAGCACGTCCGAATCGACTGCGGCGCTGGGA |
| | | TGTCTCGTGAAGGACTACTTCCCCGAGCCCGTGACCGTGTCATGGAACTCAGGCGCATTGACC |
| | | TCGGGAGTGCACACGTTCCCGGCAGTGTTGCAGTCGTCGGGCCTTTACTCGCTGTCGTCCGTG |
| | | GTCACGGTGCCTTCGTCGAATTTCGGGACGCAGACTTACACATGTAATGTGGATCACAAACCG |
| | | TCCAATACCAAGGTCGATAAGACGGTCGAAAGGAAATGCTGCGTGGAATGTCCTCCCTGCCCA |
| | | GCACCGCCAGTCGCGGGTCCCAGCGTCTTTTTGTTCCCACCGAAGCCCAAGGACACACTGATG |
| | | ATCAGCCGTACGCCGGAGGTAACATGCGTAGTGGTAGATGTCTCGCATGAGGACCCTGAAGTG |
| | | CAGTTCAATTGGTATGTAGACGGCGTGGAGGTGCACAACGCCAAGACCAAGCCACGAGAAGAA |
| | | CAGTTCAACTCGACTTTTAGAGTGGTATCCGTCCTGACCGTCGTGCACCAGGACTGGCTCAAT |
| | | GGAAAGGAGTACAAATGCAAGGTATCCAACAAGGGGTTGCCAGCTCCAATCGAAAAGACCATC |
| | | TCAAAGACAAAGGGGCAGCCCAGAGAGCCCCAAGTGTATACGCTTCCACCCTCAAGGGAGGAG |
| | | ATGACAAAGAATCAGGTATCACTCACATGTTTGGTGAAAGGGTTTTATCCGAGCGATATTGCG |
| | | GTCGAGTGGGAAAGCAACGGTCAACCGGAGAACAACTATAAGACGACTCCCCCTATGCTGGAC |
| | | AGCGACGGGTCGTTCTTTCTGTATTCCAAACTCACGGTGGACAAATCGAGGTGGCAGCAAGGA |
| | | AACGTATTCTCATGCTCAGTAATGCACGAGGCCCTCCATAATCATTACACGCAGAAATCATTA |
| | | AGCTTATCGCCGGGT |
| 1389 | HC Ab45 | GAAGTGCAGCTGCTGGAAAGCGGCGGCGGCGTGGTGCAGCCGGGCCGTAGCCTGCGTCTGAGC |
| | | TGCGCGGCGAGCGGCTTTACCTTTAGCAGCTATGCGatgCATTGGGTGCGTCAGGCGCCGGGC |
| | | AAAGGCCTGGAATGGGTGGCGGTGATTAGCTATGATGGCAGCAACAAATATTATGCGGATAGC |
| | | GTGAAAGGCCGTTTTACCATTAGCCGTGATAACAGCAAAAACACCCTGAGCCTGCAGatgAAC |
| | | AGCCTGCGTGTGGAAGATACCGCGATTTATTATTGCGTGCGTGGCGCGGGCCTGGGCCTGACC |
| | | TATGGCCCGGATGGCTTTGATATTTGGGGCCAGGGCACCatgGTGACCGTGAGCAGCAAGGGA |
| | | CCCTCGGTGTTCCCTCTCGCCCCCTCATCGAGGAGCACGTCCGAATCGACTGCGGCGCTGGGA |
| | | TGTCTCGTGAAGGACTACTTCCCCGAGCCCGTGACCGTGTCATGGAACTCAGGCGCATTGACC |
| | | TCGGGAGTGCACACGTTCCCGGCAGTGTTGCAGTCGTCGGGCCTTTACTCGCTGTCGTCCGTG |
| | | GTCACGGTGCCTTCGTCGAATTTCGGGACGCAGACTTACACATGTAATGTGGATCACAAACCG |
| | | TCCAATACCAAGGTCGATAAGACGGTCGAAAGGAAATGCTGCGTGGAATGTCCTCCCTGCCCA |
| | | GCACCGCCAGTCGCGGGTCCCAGCGTCTTTTTGTTCCCACCGAAGCCCAAGGACACACTGATG |
| | | ATCAGCCGTACGCCGGAGGTAACATGCGTAGTGGTAGATGTCTCGCATGAGGACCCTGAAGTG |
| | | CAGTTCAATTGGTATGTAGACGGCGTGGAGGTGCACAACGCCAAGACCAAGCCACGAGAAGAA |
| | | CAGTTCAACTCGACTTTTAGAGTGGTATCCGTCCTGACCGTCGTGCACCAGGACTGGCTCAAT |
| | | GGAAAGGAGTACAAATGCAAGGTATCCAACAAGGGGTTGCCAGCTCCAATCGAAAAGACCATC |
| | | TCAAAGACAAAGGGGCAGCCCAGAGAGCCCCAAGTGTATACGCTTCCACCCTCAAGGGAGGAG |
| | | ATGACAAAGAATCAGGTATCACTCACATGTTTGGTGAAAGGGTTTTATCCGAGCGATATTGCG |
| | | GTCGAGTGGGAAAGCAACGGTCAACCGGAGAACAACTATAAGACGACTCCCCCTATGCTGGAC |
| | | AGCGACGGGTCGTTCTTTCTGTATTCCAAACTCACGGTGGACAAATCGAGGTGGCAGCAAGGA |
| | | AACGTATTCTCATGCTCAGTAATGCACGAGGCCCTCCATAATCATTACACGCAGAAATCATTA |
| | | AGCTTATCGCCGGGT |
| 1390 | HC Ab46 | GAAGTGCAGCTGCTGGAAAGCGGCGGCGGCGTGGTGCAGCCGGGCCGTAGCCTGCGTCTGAGC |
| | | TGCGCGGCGAGCGGCTTTACCTTTAGCAGCTATGCGatgCATTGGGTGCGTCAGGCGCCGGGC |
| | | AAAGGCCTGGAATGGGTGGCGGTGATTAGCTATGATGGCAGCAACAAATATTATGCGGATAGC |
| | | GTGAAAGGCCGTTTTACCATTAGCCGTGATAACAGCAAAAACACCCTGAGCCTGCAGatgAAC |
| | | AGCCTGCGTGTGGAAGATACCGCGATTTATTATTGCGTGCGTGGCGCGGGCCTGGGCTATCCG |
| | | TATGGCCCGGATGGCTTTGATATTTGGGGCCAGGGCACCatgGTGACCGTGAGCAGCAAGGGA |
| | | CCCTCGGTGTTCCCTCTCGCCCCCTCATCGAGGAGCACGTCCGAATCGACTGCGGCGCTGGGA |
| | | TGTCTCGTGAAGGACTACTTCCCCGAGCCCGTGACCGTGTCATGGAACTCAGGCGCATTGACC |
| | | TCGGGAGTGCACACGTTCCCGGCAGTGTTGCAGTCGTCGGGCCTTTACTCGCTGTCGTCCGTG |
| | | GTCACGGTGCCTTCGTCGAATTTCGGGACGCAGACTTACACATGTAATGTGGATCACAAACCG |
| | | TCCAATACCAAGGTCGATAAGACGGTCGAAAGGAAATGCTGCGTGGAATGTCCTCCCTGCCCA |
| | | GCACCGCCAGTCGCGGGTCCCAGCGTCTTTTTGTTCCCACCGAAGCCCAAGGACACACTGATG |
| | | ATCAGCCGTACGCCGGAGGTAACATGCGTAGTGGTAGATGTCTCGCATGAGGACCCTGAAGTG |
| | | CAGTTCAATTGGTATGTAGACGGCGTGGAGGTGCACAACGCCAAGACCAAGCCACGAGAAGAA |
| | | CAGTTCAACTCGACTTTTAGAGTGGTATCCGTCCTGACCGTCGTGCACCAGGACTGGCTCAAT |
| | | GGAAAGGAGTACAAATGCAAGGTATCCAACAAGGGGTTGCCAGCTCCAATCGAAAAGACCATC |
| | | TCAAAGACAAAGGGGCAGCCCAGAGAGCCCCAAGTGTATACGCTTCCACCCTCAAGGGAGGAG |
| | | ATGACAAAGAATCAGGTATCACTCACATGTTTGGTGAAAGGGTTTTATCCGAGCGATATTGCG |
| | | GTCGAGTGGGAAAGCAACGGTCAACCGGAGAACAACTATAAGACGACTCCCCCTATGCTGGAC |
| | | AGCGACGGGTCGTTCTTTCTGTATTCCAAACTCACGGTGGACAAATCGAGGTGGCAGCAAGGA |
| | | AACGTATTCTCATGCTCAGTAATGCACGAGGCCCTCCATAATCATTACACGCAGAAATCATTA |
| | | AGCTTATCGCCGGGT |
| 1391 | HC Ab47 | GAAGTGCAGCTGCTGGAAAGCGGCGGCGGCGTGGTGCAGCCGGGCCGTAGCCTGCGTCTGAGC |
| | | TGCGCGGCGAGCGGCTTTACCTTTAGCAGCTATGCGatgCATTGGGTGCGTCAGGCGCCGGGC |
| | | AAAGGCCTGGAATGGGTGGCGGTGATTAGCTATGATGGCAGCAACAAATATTATGCGGATAGC |
| | | GTGAAAGGCCGTTTTACCATTAGCCGTGATAACAGCAAAAACACCCTGAGCCTGCAGatgAAC |
| | | AGCCTGCGTGTGGAAGATACCGCGATTTATTATTGCGTGCGTGGCGCGGGCCGTGGCTATCCG |
| | | CATGGCCCGGATGGCTTTGATATTTGGGGCCAGGGCACCatgGTGACCGTGAGCAGCAAGGGA |
| | | CCCTCGGTGTTCCCTCTCGCCCCCTCATCGAGGAGCACGTCCGAATCGACTGCGGCGCTGGGA |
| | | TGTCTCGTGAAGGACTACTTCCCCGAGCCCGTGACCGTGTCATGGAACTCAGGCGCATTGACC |
| | | TCGGGAGTGCACACGTTCCCGGCAGTGTTGCAGTCGTCGGGCCTTTACTCGCTGTCGTCCGTG |
| | | GTCACGGTGCCTTCGTCGAATTTCGGGACGCAGACTTACACATGTAATGTGGATCACAAACCG |
| | | TCCAATACCAAGGTCGATAAGACGGTCGAAAGGAAATGCTGCGTGGAATGTCCTCCCTGCCCA |
| | | GCACCGCCAGTCGCGGGTCCCAGCGTCTTTTTGTTCCCACCGAAGCCCAAGGACACACTGATG |
| | | ATCAGCCGTACGCCGGAGGTAACATGCGTAGTGGTAGATGTCTCGCATGAGGACCCTGAAGTG |
| | | CAGTTCAATTGGTATGTAGACGGCGTGGAGGTGCACAACGCCAAGACCAAGCCACGAGAAGAA |
| | | CAGTTCAACTCGACTTTTAGAGTGGTATCCGTCCTGACCGTCGTGCACCAGGACTGGCTCAAT |
| | | GGAAAGGAGTACAAATGCAAGGTATCCAACAAGGGGTTGCCAGCTCCAATCGAAAAGACCATC |
| | | TCAAAGACAAAGGGGCAGCCCAGAGAGCCCCAAGTGTATACGCTTCCACCCTCAAGGGAGGAG |
| | | ATGACAAAGAATCAGGTATCACTCACATGTTTGGTGAAAGGGTTTTATCCGAGCGATATTGCG |
| | | GTCGAGTGGGAAAGCAACGGTCAACCGGAGAACAACTATAAGACGACTCCCCCTATGCTGGAC |
| | | AGCGACGGGTCGTTCTTTCTGTATTCCAAACTCACGGTGGACAAATCGAGGTGGCAGCAAGGA |
| | | AACGTATTCTCATGCTCAGTAATGCACGAGGCCCTCCATAATCATTACACGCAGAAATCATTA |
| | | AGCTTATCGCCGGGT |
| 1392 | HC Ab48 | GAAGTGCAGCTGCTGGAAAGCGGCGGCGGCGTGGTGCAGCCGGGCCGTAGCCTGCGTCTGAGC |
| | | TGCGCGGCGAGCGGCTTTACCTTTAGCAGCTATGCGatgCATTGGGTGCGTCAGGCGCCGGGC |
| | | AAAGGCCTGGAATGGGTGGCGGTGATTAGCTATGATGGCAGCAACAAATATTATGCGGATAGC |
| | | GTGAAAGGCCGTTTTACCATTAGCCGTGATAACAGCAAAAACACCCTGAGCCTGCAGatgAAC |
| | | AGCCTGCGTGTGGAAGATACCGCGATTTATTATTGCGTGCGTGGCGCGGGCATTGGCTATCCG |
| | | CATGGCCCGGATGGCTTTGATATTTGGGGCCAGGGCACCatgGTGACCGTGAGCAGCAAGGGA |
| | | CCCTCGGTGTTCCCTCTCGCCCCCTCATCGAGGAGCACGTCCGAATCGACTGCGGCGCTGGGA |
| | | TGTCTCGTGAAGGACTACTTCCCCGAGCCCGTGACCGTGTCATGGAACTCAGGCGCATTGACC |
| | | TCGGGAGTGCACACGTTCCCGGCAGTGTTGCAGTCGTCGGGCCTTTACTCGCTGTCGTCCGTG |
| | | GTCACGGTGCCTTCGTCGAATTTCGGGACGCAGACTTACACATGTAATGTGGATCACAAACCG |
| | | TCCAATACCAAGGTCGATAAGACGGTCGAAAGGAAATGCTGCGTGGAATGTCCTCCCTGCCCA |
| | | GCACCGCCAGTCGCGGGTCCCAGCGTCTTTTTGTTCCCACCGAAGCCCAAGGACACACTGATG |
| | | ATCAGCCGTACGCCGGAGGTAACATGCGTAGTGGTAGATGTCTCGCATGAGGACCCTGAAGTG |
| | | CAGTTCAATTGGTATGTAGACGGCGTGGAGGTGCACAACGCCAAGACCAAGCCACGAGAAGAA |
| | | CAGTTCAACTCGACTTTTAGAGTGGTATCCGTCCTGACCGTCGTGCACCAGGACTGGCTCAAT |
| | | GGAAAGGAGTACAAATGCAAGGTATCCAACAAGGGGTTGCCAGCTCCAATCGAAAAGACCATC |
| | | TCAAAGACAAAGGGGCAGCCCAGAGAGCCCCAAGTGTATACGCTTCCACCCTCAAGGGAGGAG |
| | | ATGACAAAGAATCAGGTATCACTCACATGTTTGGTGAAAGGGTTTTATCCGAGCGATATTGCG |
| | | GTCGAGTGGGAAAGCAACGGTCAACCGGAGAACAACTATAAGACGACTCCCCCTATGCTGGAC |
| | | AGCGACGGGTCGTTCTTTCTGTATTCCAAACTCACGGTGGACAAATCGAGGTGGCAGCAAGGA |
| | | AACGTATTCTCATGCTCAGTAATGCACGAGGCCCTCCATAATCATTACACGCAGAAATCATTA |
| | | AGCTTATCGCCGGGT |
| 1393 | HC Ab49 | GAAGTGCAGCTGCTGGAAAGCGGCGGCGGCGTGGTGCAGCCGGGCCGTAGCCTGCGTCTGAGC |
| | | TGCGCGGCGAGCGGCTTTACCTTTAGCAGCTATGCGatgCATTGGGTGCGTCAGGCGCCGGGC |
| | | AAAGGCCTGGAATGGGTGGCGGTGATTAGCTATGATGGCAGCAACAAATATTATGCGGATAGC |
| | | GTGAAAGGCCGTTTTACCATTAGCCGTGATAACAGCAAAAACACCCTGAGCCTGCAGatgAAC |
| | | AGCCTGCGTGTGGAAGATACCGCGATTTATTATTGCGTGCGTGGCGCGGGCCGTGGCTATCCG |
| | | TATGGCCCGGATGGCTTTGATATTTGGGGCCAGGGCACCatgGTGACCGTGAGCAGCAAGGGA |
| | | CCCTCGGTGTTCCCTCTCGCCCCCTCATCGAGGAGCACGTCCGAATCGACTGCGGCGCTGGGA |
| | | TGTCTCGTGAAGGACTACTTCCCCGAGCCCGTGACCGTGTCATGGAACTCAGGCGCATTGACC |
| | | TCGGGAGTGCACACGTTCCCGGCAGTGTTGCAGTCGTCGGGCCTTTACTCGCTGTCGTCCGTG |
| | | GTCACGGTGCCTTCGTCGAATTTCGGGACGCAGACTTACACATGTAATGTGGATCACAAACCG |
| | | TCCAATACCAAGGTCGATAAGACGGTCGAAAGGAAATGCTGCGTGGAATGTCCTCCCTGCCCA |
| | | GCACCGCCAGTCGCGGGTCCCAGCGTCTTTTTGTTCCCACCGAAGCCCAAGGACACACTGATG |
| | | ATCAGCCGTACGCCGGAGGTAACATGCGTAGTGGTAGATGTCTCGCATGAGGACCCTGAAGTG |
| | | CAGTTCAATTGGTATGTAGACGGCGTGGAGGTGCACAACGCCAAGACCAAGCCACGAGAAGAA |
| | | CAGTTCAACTCGACTTTTAGAGTGGTATCCGTCCTGACCGTCGTGCACCAGGACTGGCTCAAT |
| | | GGAAAGGAGTACAAATGCAAGGTATCCAACAAGGGGTTGCCAGCTCCAATCGAAAAGACCATC |
| | | TCAAAGACAAAGGGGCAGCCCAGAGAGCCCCAAGTGTATACGCTTCCACCCTCAAGGGAGGAG |
| | | ATGACAAAGAATCAGGTATCACTCACATGTTTGGTGAAAGGGTTTTATCCGAGCGATATTGCG |
| | | GTCGAGTGGGAAAGCAACGGTCAACCGGAGAACAACTATAAGACGACTCCCCCTATGCTGGAC |
| | | AGCGACGGGTCGTTCTTTCTGTATTCCAAACTCACGGTGGACAAATCGAGGTGGCAGCAAGGA |
| | | AACGTATTCTCATGCTCAGTAATGCACGAGGCCCTCCATAATCATTACACGCAGAAATCATTA |
| | | AGCTTATCGCCGGGT |
| 1394 | HC Ab50 | GAAGTGCAGCTGCTGGAAAGCGGCGGCGGCGTGGTGCAGCCGGGCCGTAGCCTGCGTCTGAGC |
| | | TGCGCGGCGAGCGGCTTTACCTTTAGCAGCTATGCGatgCATTGGGTGCGTCAGGCGCCGGGC |
| | | AAAGGCCTGGAATGGGTGGCGGTGATTAGCTATGATGGCAGCAACAAATATTATGCGGATAGC |
| | | GTGAAAGGCCGTTTTACCATTAGCCGTGATAACAGCAAAAACACCCTGAGCCTGCAGatgAAC |
| | | AGCCTGCGTGTGGAAGATACCGCGATTTATTATTGCGTGCGTGGCGCGGGCCTGGGCTTTCCG |
| | | TTTGGCCCGGATGGCTTTGATATTTGGGGCCAGGGCACCatgGTGACCGTGAGCAGCAAGGGA |
| | | CCCTCGGTGTTCCCTCTCGCCCCCTCATCGAGGAGCACGTCCGAATCGACTGCGGCGCTGGGA |
| | | TGTCTCGTGAAGGACTACTTCCCCGAGCCCGTGACCGTGTCATGGAACTCAGGCGCATTGACC |
| | | TCGGGAGTGCACACGTTCCCGGCAGTGTTGCAGTCGTCGGGCCTTTACTCGCTGTCGTCCGTG |
| | | GTCACGGTGCCTTCGTCGAATTTCGGGACGCAGACTTACACATGTAATGTGGATCACAAACCG |
| | | TCCAATACCAAGGTCGATAAGACGGTCGAAAGGAAATGCTGCGTGGAATGTCCTCCCTGCCCA |
| | | GCACCGCCAGTCGCGGGTCCCAGCGTCTTTTTGTTCCCACCGAAGCCCAAGGACACACTGATG |
| | | ATCAGCCGTACGCCGGAGGTAACATGCGTAGTGGTAGATGTCTCGCATGAGGACCCTGAAGTG |
| | | CAGTTCAATTGGTATGTAGACGGCGTGGAGGTGCACAACGCCAAGACCAAGCCACGAGAAGAA |
| | | CAGTTCAACTCGACTTTTAGAGTGGTATCCGTCCTGACCGTCGTGCACCAGGACTGGCTCAAT |
| | | GGAAAGGAGTACAAATGCAAGGTATCCAACAAGGGGTTGCCAGCTCCAATCGAAAAGACCATC |
| | | TCAAAGACAAAGGGGCAGCCCAGAGAGCCCCAAGTGTATACGCTTCCACCCTCAAGGGAGGAG |
| | | ATGACAAAGAATCAGGTATCACTCACATGTTTGGTGAAAGGGTTTTATCCGAGCGATATTGCG |
| | | GTCGAGTGGGAAAGCAACGGTCAACCGGAGAACAACTATAAGACGACTCCCCCTATGCTGGAC |
| | | AGCGACGGGTCGTTCTTTCTGTATTCCAAACTCACGGTGGACAAATCGAGGTGGCAGCAAGGA |
| | | AACGTATTCTCATGCTCAGTAATGCACGAGGCCCTCCATAATCATTACACGCAGAAATCATTA |
| | | AGCTTATCGCCGGGT |
| 1395 | HC Ab51 | GAAGTGCAGCTGCTGGAAAGCGGCGGCGGCGTGGTGCAGCCGGGCCGTAGCCTGCGTCTGAGC |
| | | TGCGCGGCGAGCGGCTTTACCTTTAGCAGCTATGCGatgCATTGGGTGCGTCAGGCGCCGGGC |
| | | AAAGGCCTGGAATGGGTGGCGGTGATTAGCTATGATGGCAGCAACAAATATTATGCGGATAGC |
| | | GTGAAAGGCCGTTTTACCATTAGCCGTGATAACAGCAAAAACACCCTGAGCCTGCAGatgAAC |
| | | AGCCTGCGTGTGGAAGATACCGCGATTTATTATTGCGTGCGTGGCGCGGGCCGTGGCTTTCCG |
| | | TATGGCCCGGATGGCTTTGATATTTGGGGCCAGGGCACCatgGTGACCGTGAGCAGCAAGGGA |
| | | CCCTCGGTGTTCCCTCTCGCCCCCTCATCGAGGAGCACGTCCGAATCGACTGCGGCGCTGGGA |
| | | TGTCTCGTGAAGGACTACTTCCCCGAGCCCGTGACCGTGTCATGGAACTCAGGCGCATTGACC |
| | | TCGGGAGTGCACACGTTCCCGGCAGTGTTGCAGTCGTCGGGCCTTTACTCGCTGTCGTCCGTG |
| | | GTCACGGTGCCTTCGTCGAATTTCGGGACGCAGACTTACACATGTAATGTGGATCACAAACCG |
| | | TCCAATACCAAGGTCGATAAGACGGTCGAAAGGAAATGCTGCGTGGAATGTCCTCCCTGCCCA |
| | | GCACCGCCAGTCGCGGGTCCCAGCGTCTTTTTGTTCCCACCGAAGCCCAAGGACACACTGATG |
| | | ATCAGCCGTACGCCGGAGGTAACATGCGTAGTGGTAGATGTCTCGCATGAGGACCCTGAAGTG |
| | | CAGTTCAATTGGTATGTAGACGGCGTGGAGGTGCACAACGCCAAGACCAAGCCACGAGAAGAA |
| | | CAGTTCAACTCGACTTTTAGAGTGGTATCCGTCCTGACCGTCGTGCACCAGGACTGGCTCAAT |
| | | GGAAAGGAGTACAAATGCAAGGTATCCAACAAGGGGTTGCCAGCTCCAATCGAAAAGACCATC |
| | | TCAAAGACAAAGGGGCAGCCCAGAGAGCCCCAAGTGTATACGCTTCCACCCTCAAGGGAGGAG |
| | | ATGACAAAGAATCAGGTATCACTCACATGTTTGGTGAAAGGGTTTTATCCGAGCGATATTGCG |
| | | GTCGAGTGGGAAAGCAACGGTCAACCGGAGAACAACTATAAGACGACTCCCCCTATGCTGGAC |
| | | AGCGACGGGTCGTTCTTTCTGTATTCCAAACTCACGGTGGACAAATCGAGGTGGCAGCAAGGA |
| | | AACGTATTCTCATGCTCAGTAATGCACGAGGCCCTCCATAATCATTACACGCAGAAATCATTA |
| | | AGCTTATCGCCGGGT |
| 1396 | HC Ab52 | GAAGTGCAGCTGCTGGAAAGCGGCGGCGGCGTGGTGCAGCCGGGCCGTAGCCTGCGTCTGAGC |
| | | TGCGCGGCGAGCGGCTTTACCTTTAGCAGCTATGCGatgCATTGGGTGCGTCAGGCGCCGGGC |
| | | AAAGGCCTGGAATGGGTGGCGGTGATTAGCTATGATGGCAGCAACAAATATTATGCGGATAGC |
| | | GTGAAAGGCCGTTTTACCATTAGCCGTGATAACAGCAAAAACACCCTGAGCCTGCAGatgAAC |
| | | AGCCTGCGTGTGGAAGATACCGCGATTTATTATTGCGTGCGTGGCGCGGGCCTGGGCTATCCG |
| | | AACGGCCCGGATGGCTTTGATATTTGGGGCCAGGGCACCatgGTGACCGTGAGCAGCAAGGGA |
| | | CCCTCGGTGTTCCCTCTCGCCCCCTCATCGAGGAGCACGTCCGAATCGACTGCGGCGCTGGGA |
| | | TGTCTCGTGAAGGACTACTTCCCCGAGCCCGTGACCGTGTCATGGAACTCAGGCGCATTGACC |
| | | TCGGGAGTGCACACGTTCCCGGCAGTGTTGCAGTCGTCGGGCCTTTACTCGCTGTCGTCCGTG |
| | | GTCACGGTGCCTTCGTCGAATTTCGGGACGCAGACTTACACATGTAATGTGGATCACAAACCG |
| | | TCCAATACCAAGGTCGATAAGACGGTCGAAAGGAAATGCTGCGTGGAATGTCCTCCCTGCCCA |
| | | GCACCGCCAGTCGCGGGTCCCAGCGTCTTTTTGTTCCCACCGAAGCCCAAGGACACACTGATG |
| | | ATCAGCCGTACGCCGGAGGTAACATGCGTAGTGGTAGATGTCTCGCATGAGGACCCTGAAGTG |
| | | CAGTTCAATTGGTATGTAGACGGCGTGGAGGTGCACAACGCCAAGACCAAGCCACGAGAAGAA |
| | | CAGTTCAACTCGACTTTTAGAGTGGTATCCGTCCTGACCGTCGTGCACCAGGACTGGCTCAAT |
| | | GGAAAGGAGTACAAATGCAAGGTATCCAACAAGGGGTTGCCAGCTCCAATCGAAAAGACCATC |
| | | TCAAAGACAAAGGGGCAGCCCAGAGAGCCCCAAGTGTATACGCTTCCACCCTCAAGGGAGGAG |
| | | ATGACAAAGAATCAGGTATCACTCACATGTTTGGTGAAAGGGTTTTATCCGAGCGATATTGCG |
| | | GTCGAGTGGGAAAGCAACGGTCAACCGGAGAACAACTATAAGACGACTCCCCCTATGCTGGAC |
| | | AGCGACGGGTCGTTCTTTCTGTATTCCAAACTCACGGTGGACAAATCGAGGTGGCAGCAAGGA |
| | | AACGTATTCTCATGCTCAGTAATGCACGAGGCCCTCCATAATCATTACACGCAGAAATCATTA |
| | | AGCTTATCGCCGGGT |
| 1397 | HC Ab53 | GAAGTGCAGCTGCTGGAAAGCGGCGGCGGCGTGGTGCAGCCGGGCCGTAGCCTGCGTCTGAGC |
| | | TGCGCGGCGAGCGGCTTTACCTTTAGCAGCTATGCGatgCATTGGGTGCGTCAGGCGCCGGGC |
| | | AAAGGCCTGGAATGGGTGGCGGTGATTAGCTATGATGGCAGCAACAAATATTATGCGGATAGC |
| | | GTGAAAGGCCGTTTTACCATTAGCCGTGATAACAGCAAAAACACCCTGAGCCTGCAGatgAAC |
| | | AGCCTGCGTGTGGAAGATACCGCGATTTATTATTGCGTGCGTGGCGCGGGCCAGGGCTTTCCG |
| | | TATGGCCCGGATGGCTTTGATATTTGGGGCCAGGGCACCatgGTGACCGTGAGCAGCAAGGGA |
| | | CCCTCGGTGTTCCCTCTCGCCCCCTCATCGAGGAGCACGTCCGAATCGACTGCGGCGCTGGGA |
| | | TGTCTCGTGAAGGACTACTTCCCCGAGCCCGTGACCGTGTCATGGAACTCAGGCGCATTGACC |
| | | TCGGGAGTGCACACGTTCCCGGCAGTGTTGCAGTCGTCGGGCCTTTACTCGCTGTCGTCCGTG |
| | | GTCACGGTGCCTTCGTCGAATTTCGGGACGCAGACTTACACATGTAATGTGGATCACAAACCG |
| | | TCCAATACCAAGGTCGATAAGACGGTCGAAAGGAAATGCTGCGTGGAATGTCCTCCCTGCCCA |
| | | GCACCGCCAGTCGCGGGTCCCAGCGTCTTTTTGTTCCCACCGAAGCCCAAGGACACACTGATG |
| | | ATCAGCCGTACGCCGGAGGTAACATGCGTAGTGGTAGATGTCTCGCATGAGGACCCTGAAGTG |
| | | CAGTTCAATTGGTATGTAGACGGCGTGGAGGTGCACAACGCCAAGACCAAGCCACGAGAAGAA |
| | | CAGTTCAACTCGACTTTTAGAGTGGTATCCGTCCTGACCGTCGTGCACCAGGACTGGCTCAAT |
| | | GGAAAGGAGTACAAATGCAAGGTATCCAACAAGGGGTTGCCAGCTCCAATCGAAAAGACCATC |
| | | TCAAAGACAAAGGGGCAGCCCAGAGAGCCCCAAGTGTATACGCTTCCACCCTCAAGGGAGGAG |
| | | ATGACAAAGAATCAGGTATCACTCACATGTTTGGTGAAAGGGTTTTATCCGAGCGATATTGCG |
| | | GTCGAGTGGGAAAGCAACGGTCAACCGGAGAACAACTATAAGACGACTCCCCCTATGCTGGAC |
| | | AGCGACGGGTCGTTCTTTCTGTATTCCAAACTCACGGTGGACAAATCGAGGTGGCAGCAAGGA |
| | | AACGTATTCTCATGCTCAGTAATGCACGAGGCCCTCCATAATCATTACACGCAGAAATCATTA |
| | | AGCTTATCGCCGGGT |
| 1398 | HC Ab54 | GAAGTGCAGCTGCTGGAAAGCGGCGGCGGCGTGGTGCAGCCGGGCCGTAGCCTGCGTCTGAGC |
| | | TGCGCGGCGAGCGGCTTTACCTTTAGCAGCTATGCGatgCATTGGGTGCGTCAGGCGCCGGGC |
| | | AAAGGCCTGGAATGGGTGGCGGTGATTAGCTATGATGGCAGCAACAAATATTATGCGGATAGC |
| | | GTGAAAGGCCGTTTTACCATTAGCCGTGATAACAGCAAAAACACCCTGAGCCTGCAGatgAAC |
| | | AGCCTGCGTGTGGAAGATACCGCGATTTATTATTGCGTGCGTGGCGCGGGCCAGGGCTATCCG |
| | | TATGGCCCGGATGGCTTTGATATTTGGGGCCAGGGCACCatgGTGACCGTGAGCAGCAAGGGA |
| | | CCCTCGGTGTTCCCTCTCGCCCCCTCATCGAGGAGCACGTCCGAATCGACTGCGGCGCTGGGA |
| | | TGTCTCGTGAAGGACTACTTCCCCGAGCCCGTGACCGTGTCATGGAACTCAGGCGCATTGACC |
| | | TCGGGAGTGCACACGTTCCCGGCAGTGTTGCAGTCGTCGGGCCTTTACTCGCTGTCGTCCGTG |
| | | GTCACGGTGCCTTCGTCGAATTTCGGGACGCAGACTTACACATGTAATGTGGATCACAAACCG |
| | | TCCAATACCAAGGTCGATAAGACGGTCGAAAGGAAATGCTGCGTGGAATGTCCTCCCTGCCCA |
| | | GCACCGCCAGTCGCGGGTCCCAGCGTCTTTTTGTTCCCACCGAAGCCCAAGGACACACTGATG |
| | | ATCAGCCGTACGCCGGAGGTAACATGCGTAGTGGTAGATGTCTCGCATGAGGACCCTGAAGTG |
| | | CAGTTCAATTGGTATGTAGACGGCGTGGAGGTGCACAACGCCAAGACCAAGCCACGAGAAGAA |
| | | CAGTTCAACTCGACTTTTAGAGTGGTATCCGTCCTGACCGTCGTGCACCAGGACTGGCTCAAT |
| | | GGAAAGGAGTACAAATGCAAGGTATCCAACAAGGGGTTGCCAGCTCCAATCGAAAAGACCATC |
| | | TCAAAGACAAAGGGGCAGCCCAGAGAGCCCCAAGTGTATACGCTTCCACCCTCAAGGGAGGAG |
| | | ATGACAAAGAATCAGGTATCACTCACATGTTTGGTGAAAGGGTTTTATCCGAGCGATATTGCG |
| | | GTCGAGTGGGAAAGCAACGGTCAACCGGAGAACAACTATAAGACGACTCCCCCTATGCTGGAC |
| | | AGCGACGGGTCGTTCTTTCTGTATTCCAAACTCACGGTGGACAAATCGAGGTGGCAGCAAGGA |
| | | AACGTATTCTCATGCTCAGTAATGCACGAGGCCCTCCATAATCATTACACGCAGAAATCATTA |
| | | AGCTTATCGCCGGGT |
| 1399 | HC Ab55 | GAAGTGCAGCTGCTGGAAAGCGGCGGCGGCGTGGTGCAGCCGGGCCGTAGCCTGCGTCTGAGC |
| | | TGCGCGGCGAGCGGCTTTACCTTTAGCAGCTATGCGatgCATTGGGTGCGTCAGGCGCCGGGC |
| | | AAAGGCCTGGAATGGGTGGCGGTGATTAGCTATGATGGCAGCAACAAATATTATGCGGATAGC |
| | | GTGAAAGGCCGTTTTACCATTAGCCGTGATAACAGCAAAAACACCCTGAGCCTGCAGatgAAC |
| | | AGCCTGCGTGTGGAAGATACCGCGATTTATTATTGCGTGCGTGGCGCGGGCACCGGCTTTACC |
| | | TATGGCCCGGATGGCTTTGATATTTGGGGCCAGGGCACCatgGTGACCGTGAGCAGCAAGGGA |
| | | CCCTCGGTGTTCCCTCTCGCCCCCTCATCGAGGAGCACGTCCGAATCGACTGCGGCGCTGGGA |
| | | TGTCTCGTGAAGGACTACTTCCCCGAGCCCGTGACCGTGTCATGGAACTCAGGCGCATTGACC |
| | | TCGGGAGTGCACACGTTCCCGGCAGTGTTGCAGTCGTCGGGCCTTTACTCGCTGTCGTCCGTG |
| | | GTCACGGTGCCTTCGTCGAATTTCGGGACGCAGACTTACACATGTAATGTGGATCACAAACCG |
| | | TCCAATACCAAGGTCGATAAGACGGTCGAAAGGAAATGCTGCGTGGAATGTCCTCCCTGCCCA |
| | | GCACCGCCAGTCGCGGGTCCCAGCGTCTTTTTGTTCCCACCGAAGCCCAAGGACACACTGATG |
| | | ATCAGCCGTACGCCGGAGGTAACATGCGTAGTGGTAGATGTCTCGCATGAGGACCCTGAAGTG |
| | | CAGTTCAATTGGTATGTAGACGGCGTGGAGGTGCACAACGCCAAGACCAAGCCACGAGAAGAA |
| | | CAGTTCAACTCGACTTTTAGAGTGGTATCCGTCCTGACCGTCGTGCACCAGGACTGGCTCAAT |
| | | GGAAAGGAGTACAAATGCAAGGTATCCAACAAGGGGTTGCCAGCTCCAATCGAAAAGACCATC |
| | | TCAAAGACAAAGGGGCAGCCCAGAGAGCCCCAAGTGTATACGCTTCCACCCTCAAGGGAGGAG |
| | | ATGACAAAGAATCAGGTATCACTCACATGTTTGGTGAAAGGGTTTTATCCGAGCGATATTGCG |
| | | GTCGAGTGGGAAAGCAACGGTCAACCGGAGAACAACTATAAGACGACTCCCCCTATGCTGGAC |
| | | AGCGACGGGTCGTTCTTTCTGTATTCCAAACTCACGGTGGACAAATCGAGGTGGCAGCAAGGA |
| | | AACGTATTCTCATGCTCAGTAATGCACGAGGCCCTCCATAATCATTACACGCAGAAATCATTA |
| | | AGCTTATCGCCGGGT |
| 1400 | HC Ab56 | GAAGTGCAGCTGCTGGAAAGCGGCGGCGGCGTGGTGCAGCCGGGCCGTAGCCTGCGTCTGAGC |
| | | TGCGCGGCGAGCGGCTTTACCTTTAGCAGCTATGCGatgCATTGGGTGCGTCAGGCGCCGGGC |
| | | AAAGGCCTGGAATGGGTGGCGGTGATTAGCTATGATGGCAGCAACAAATATTATGCGGATAGC |
| | | GTGAAAGGCCGTTTTACCATTAGCCGTGATAACAGCAAAAACACCCTGAGCCTGCAGatgAAC |
| | | AGCCTGCGTGTGGAAGATACCGCGATTTATTATTGCGTGCGTGGCGCGGGCatgGGCCTGACC |
| | | TATGGCCCGGATGGCTTTGATATTTGGGGCCAGGGCACCatgGTGACCGTGAGCAGCAAGGGA |
| | | CCCTCGGTGTTCCCTCTCGCCCCCTCATCGAGGAGCACGTCCGAATCGACTGCGGCGCTGGGA |
| | | TGTCTCGTGAAGGACTACTTCCCCGAGCCCGTGACCGTGTCATGGAACTCAGGCGCATTGACC |
| | | TCGGGAGTGCACACGTTCCCGGCAGTGTTGCAGTCGTCGGGCCTTTACTCGCTGTCGTCCGTG |
| | | GTCACGGTGCCTTCGTCGAATTTCGGGACGCAGACTTACACATGTAATGTGGATCACAAACCG |
| | | TCCAATACCAAGGTCGATAAGACGGTCGAAAGGAAATGCTGCGTGGAATGTCCTCCCTGCCCA |
| | | GCACCGCCAGTCGCGGGTCCCAGCGTCTTTTTGTTCCCACCGAAGCCCAAGGACACACTGATG |
| | | ATCAGCCGTACGCCGGAGGTAACATGCGTAGTGGTAGATGTCTCGCATGAGGACCCTGAAGTG |
| | | CAGTTCAATTGGTATGTAGACGGCGTGGAGGTGCACAACGCCAAGACCAAGCCACGAGAAGAA |
| | | CAGTTCAACTCGACTTTTAGAGTGGTATCCGTCCTGACCGTCGTGCACCAGGACTGGCTCAAT |
| | | GGAAAGGAGTACAAATGCAAGGTATCCAACAAGGGGTTGCCAGCTCCAATCGAAAAGACCATC |
| | | TCAAAGACAAAGGGGCAGCCCAGAGAGCCCCAAGTGTATACGCTTCCACCCTCAAGGGAGGAG |
| | | ATGACAAAGAATCAGGTATCACTCACATGTTTGGTGAAAGGGTTTTATCCGAGCGATATTGCG |
| | | GTCGAGTGGGAAAGCAACGGTCAACCGGAGAACAACTATAAGACGACTCCCCCTATGCTGGAC |
| | | AGCGACGGGTCGTTCTTTCTGTATTCCAAACTCACGGTGGACAAATCGAGGTGGCAGCAAGGA |
| | | AACGTATTCTCATGCTCAGTAATGCACGAGGCCCTCCATAATCATTACACGCAGAAATCATTA |
| | | AGCTTATCGCCGGGT |
| 1401 | HC Ab57 | GAAGTGCAGCTGCTGGAAAGCGGCGGCGGCGTGGTGCAGCCGGGCCGTAGCCTGCGTCTGAGC |
| | | TGCGCGGCGAGCGGCTTTACCTTTAGCAGCTATGCGatgCATTGGGTGCGTCAGGCGCCGGGC |
| | | AAAGGCCTGGAATGGGTGGCGGTGATTAGCTATGATGGCAGCAACAAATATTATGCGGATAGC |
| | | GTGAAAGGCCGTTTTACCATTAGCCGTGATAACAGCAAAAACACCCTGAGCCTGCAGatgAAC |
| | | AGCCTGCGTGTGGAAGATACCGCGATTTATTATTGCGTGCGTGGCGCGGGCCTGGGCTTTCCG |
| | | TATGGCCCGGATGGCTTTGATATTTGGGGCCAGGGCACCatgGTGACCGTGAGCAGCAAGGGA |
| | | CCCTCGGTGTTCCCTCTCGCCCCCTCATCGAGGAGCACGTCCGAATCGACTGCGGCGCTGGGA |
| | | TGTCTCGTGAAGGACTACTTCCCCGAGCCCGTGACCGTGTCATGGAACTCAGGCGCATTGACC |
| | | TCGGGAGTGCACACGTTCCCGGCAGTGTTGCAGTCGTCGGGCCTTTACTCGCTGTCGTCCGTG |
| | | GTCACGGTGCCTTCGTCGAATTTCGGGACGCAGACTTACACATGTAATGTGGATCACAAACCG |
| | | TCCAATACCAAGGTCGATAAGACGGTCGAAAGGAAATGCTGCGTGGAATGTCCTCCCTGCCCA |
| | | GCACCGCCAGTCGCGGGTCCCAGCGTCTTTTTGTTCCCACCGAAGCCCAAGGACACACTGATG |
| | | ATCAGCCGTACGCCGGAGGTAACATGCGTAGTGGTAGATGTCTCGCATGAGGACCCTGAAGTG |
| | | CAGTTCAATTGGTATGTAGACGGCGTGGAGGTGCACAACGCCAAGACCAAGCCACGAGAAGAA |
| | | CAGTTCAACTCGACTTTTAGAGTGGTATCCGTCCTGACCGTCGTGCACCAGGACTGGCTCAAT |
| | | GGAAAGGAGTACAAATGCAAGGTATCCAACAAGGGGTTGCCAGCTCCAATCGAAAAGACCATC |
| | | TCAAAGACAAAGGGGCAGCCCAGAGAGCCCCAAGTGTATACGCTTCCACCCTCAAGGGAGGAG |
| | | ATGACAAAGAATCAGGTATCACTCACATGTTTGGTGAAAGGGTTTTATCCGAGCGATATTGCG |
| | | GTCGAGTGGGAAAGCAACGGTCAACCGGAGAACAACTATAAGACGACTCCCCCTATGCTGGAC |
| | | AGCGACGGGTCGTTCTTTCTGTATTCCAAACTCACGGTGGACAAATCGAGGTGGCAGCAAGGA |
| | | AACGTATTCTCATGCTCAGTAATGCACGAGGCCCTCCATAATCATTACACGCAGAAATCATTA |
| | | AGCTTATCGCCGGGT |
| 1402 | HC Ab58 | GAAGTGCAGCTGCTGGAAAGCGGCGGCGGCGTGGTGCAGCCGGGCCGTAGCCTGCGTCTGAGC |
| | | TGCGCGGCGAGCGGCTTTACCTTTAGCAGCTATGCGatgCATTGGGTGCGTCAGGCGCCGGGC |
| | | AAAGGCCTGGAATGGGTGGCGGTGATTAGCTATGATGGCAGCAACAAATATTATGCGGATAGC |
| | | GTGAAAGGCCGTTTTACCATTAGCCGTGATAACAGCAAAAACACCCTGAGCCTGCAGatgAAC |
| | | AGCCTGCGTGTGGAAGATACCGCGATTTATTATTGCGTGCGTGGCGCGGGCCTGGGCTGGGCG |
| | | TATGGCCCGGATGGCTTTGATATTTGGGGCCAGGGCACCatgGTGACCGTGAGCAGCAAGGGA |
| | | CCCTCGGTGTTCCCTCTCGCCCCCTCATCGAGGAGCACGTCCGAATCGACTGCGGCGCTGGGA |
| | | TGTCTCGTGAAGGACTACTTCCCCGAGCCCGTGACCGTGTCATGGAACTCAGGCGCATTGACC |
| | | TCGGGAGTGCACACGTTCCCGGCAGTGTTGCAGTCGTCGGGCCTTTACTCGCTGTCGTCCGTG |
| | | GTCACGGTGCCTTCGTCGAATTTCGGGACGCAGACTTACACATGTAATGTGGATCACAAACCG |
| | | TCCAATACCAAGGTCGATAAGACGGTCGAAAGGAAATGCTGCGTGGAATGTCCTCCCTGCCCA |
| | | GCACCGCCAGTCGCGGGTCCCAGCGTCTTTTTGTTCCCACCGAAGCCCAAGGACACACTGATG |
| | | ATCAGCCGTACGCCGGAGGTAACATGCGTAGTGGTAGATGTCTCGCATGAGGACCCTGAAGTG |
| | | CAGTTCAATTGGTATGTAGACGGCGTGGAGGTGCACAACGCCAAGACCAAGCCACGAGAAGAA |
| | | CAGTTCAACTCGACTTTTAGAGTGGTATCCGTCCTGACCGTCGTGCACCAGGACTGGCTCAAT |
| | | GGAAAGGAGTACAAATGCAAGGTATCCAACAAGGGGTTGCCAGCTCCAATCGAAAAGACCATC |
| | | TCAAAGACAAAGGGGCAGCCCAGAGAGCCCCAAGTGTATACGCTTCCACCCTCAAGGGAGGAG |
| | | ATGACAAAGAATCAGGTATCACTCACATGTTTGGTGAAAGGGTTTTATCCGAGCGATATTGCG |
| | | GTCGAGTGGGAAAGCAACGGTCAACCGGAGAACAACTATAAGACGACTCCCCCTATGCTGGAC |
| | | AGCGACGGGTCGTTCTTTCTGTATTCCAAACTCACGGTGGACAAATCGAGGTGGCAGCAAGGA |
| | | AACGTATTCTCATGCTCAGTAATGCACGAGGCCCTCCATAATCATTACACGCAGAAATCATTA |
| | | AGCTTATCGCCGGGT |
| 1403 | HC Ab59 | GAAGTGCAGCTGCTGGAAAGCGGCGGCGGCGTGGTGCAGCCGGGCCGTAGCCTGCGTCTGAGC |
| | | TGCGCGGCGAGCGGCTTTACCTTTAGCAGCTATGCGatgCATTGGGTGCGTCAGGCGCCGGGC |
| | | AAAGGCCTGGAATGGGTGGCGGTGATTAGCTATGATGGCAGCAACAAATATTATGCGGATAGC |
| | | GTGAAAGGCCGTTTTACCATTAGCCGTGATAACAGCAAAAACACCCTGAGCCTGCAGatgAAC |
| | | AGCCTGCGTGTGGAAGATACCGCGATTTATTATTGCGTGCGTGGCGCGGGCCGTGGCTATCCG |
| | | TATGGCCCGGATGGCTTTGATATTTGGGGCCAGGGCACCatgGTGACCGTGAGCAGCAAGGGA |
| | | CCCTCGGTGTTCCCTCTCGCCCCCTCATCGAGGAGCACGTCCGAATCGACTGCGGCGCTGGGA |
| | | TGTCTCGTGAAGGACTACTTCCCCGAGCCCGTGACCGTGTCATGGAACTCAGGCGCATTGACC |
| | | TCGGGAGTGCACACGTTCCCGGCAGTGTTGCAGTCGTCGGGCCTTTACTCGCTGTCGTCCGTG |
| | | GTCACGGTGCCTTCGTCGAATTTCGGGACGCAGACTTACACATGTAATGTGGATCACAAACCG |
| | | TCCAATACCAAGGTCGATAAGACGGTCGAAAGGAAATGCTGCGTGGAATGTCCTCCCTGCCCA |
| | | GCACCGCCAGTCGCGGGTCCCAGCGTCTTTTTGTTCCCACCGAAGCCCAAGGACACACTGATG |
| | | ATCAGCCGTACGCCGGAGGTAACATGCGTAGTGGTAGATGTCTCGCATGAGGACCCTGAAGTG |
| | | CAGTTCAATTGGTATGTAGACGGCGTGGAGGTGCACAACGCCAAGACCAAGCCACGAGAAGAA |
| | | CAGTTCAACTCGACTTTTAGAGTGGTATCCGTCCTGACCGTCGTGCACCAGGACTGGCTCAAT |
| | | GGAAAGGAGTACAAATGCAAGGTATCCAACAAGGGGTTGCCAGCTCCAATCGAAAAGACCATC |
| | | TCAAAGACAAAGGGGCAGCCCAGAGAGCCCCAAGTGTATACGCTTCCACCCTCAAGGGAGGAG |
| | | ATGACAAAGAATCAGGTATCACTCACATGTTTGGTGAAAGGGTTTTATCCGAGCGATATTGCG |
| | | GTCGAGTGGGAAAGCAACGGTCAACCGGAGAACAACTATAAGACGACTCCCCCTATGCTGGAC |
| | | AGCGACGGGTCGTTCTTTCTGTATTCCAAACTCACGGTGGACAAATCGAGGTGGCAGCAAGGA |
| | | AACGTATTCTCATGCTCAGTAATGCACGAGGCCCTCCATAATCATTACACGCAGAAATCATTA |
| | | AGCTTATCGCCGGGT |
| 1404 | HC Ab60 | GAAGTGCAGCTGCTGGAAAGCGGCGGCGGCGTGGTGCAGCCGGGCCGTAGCCTGCGTCTGAGC |
| | | TGCGCGGCGAGCGGCTTTGATTTTGCGGGCTATGCGatgCATTGGGTGCGTCAGGCGCCGGGC |
| | | AAAGGCCTGGAATGGGTGGCGGTGATTAGCTATGATGGCAGCAACAAATATTATGCGGATAGC |
| | | GTGAAAGGCCGTTTTACCATTAGCCGTGATAACAGCAAAAACACCCTGAGCCTGCAGatgAAC |
| | | AGCCTGCGTGTGGAAGATACCGCGATTTATTATTGCGTGCGTGGCGCGGGCCGTGGCCTGACC |
| | | TATGGCCCGGATGGCTTTGATATTTGGGGCCAGGGCACCatgGTGACCGTGAGCAGCAAGGGA |
| | | CCCTCGGTGTTCCCTCTCGCCCCCTCATCGAGGAGCACGTCCGAATCGACTGCGGCGCTGGGA |
| | | TGTCTCGTGAAGGACTACTTCCCCGAGCCCGTGACCGTGTCATGGAACTCAGGCGCATTGACC |
| | | TCGGGAGTGCACACGTTCCCGGCAGTGTTGCAGTCGTCGGGCCTTTACTCGCTGTCGTCCGTG |
| | | GTCACGGTGCCTTCGTCGAATTTCGGGACGCAGACTTACACATGTAATGTGGATCACAAACCG |
| | | TCCAATACCAAGGTCGATAAGACGGTCGAAAGGAAATGCTGCGTGGAATGTCCTCCCTGCCCA |
| | | GCACCGCCAGTCGCGGGTCCCAGCGTCTTTTTGTTCCCACCGAAGCCCAAGGACACACTGATG |
| | | ATCAGCCGTACGCCGGAGGTAACATGCGTAGTGGTAGATGTCTCGCATGAGGACCCTGAAGTG |
| | | CAGTTCAATTGGTATGTAGACGGCGTGGAGGTGCACAACGCCAAGACCAAGCCACGAGAAGAA |
| | | CAGTTCAACTCGACTTTTAGAGTGGTATCCGTCCTGACCGTCGTGCACCAGGACTGGCTCAAT |
| | | GGAAAGGAGTACAAATGCAAGGTATCCAACAAGGGGTTGCCAGCTCCAATCGAAAAGACCATC |
| | | TCAAAGACAAAGGGGCAGCCCAGAGAGCCCCAAGTGTATACGCTTCCACCCTCAAGGGAGGAG |
| | | ATGACAAAGAATCAGGTATCACTCACATGTTTGGTGAAAGGGTTTTATCCGAGCGATATTGCG |
| | | GTCGAGTGGGAAAGCAACGGTCAACCGGAGAACAACTATAAGACGACTCCCCCTATGCTGGAC |
| | | AGCGACGGGTCGTTCTTTCTGTATTCCAAACTCACGGTGGACAAATCGAGGTGGCAGCAAGGA |
| | | AACGTATTCTCATGCTCAGTAATGCACGAGGCCCTCCATAATCATTACACGCAGAAATCATTA |
| | | AGCTTATCGCCGGGT |
| 1405 | HC Ab61 | GAAGTGCAGCTGCTGGAAAGCGGCGGCGGCGTGGTGCAGCCGGGCCGTAGCCTGCGTCTGAGC |
| | | TGCGCGGCGAGCGGCTTTACCTTTAGCAGCTATGCGatgCATTGGGTGCGTCAGGCGCCGGGC |
| | | AAAGGCCTGGAATGGGTGGCGGTGATTAGCTATGATGGCAGCAACAAATATTATGCGGATAGC |
| | | GTGAAAGGCCGTTTTACCATTAGCCGTGATAACAGCAAAAACACCCTGAGCCTGCAGatgAAC |
| | | AGCCTGCGTGTGGAAGATACCGCGATTTATTATTGCGTGCGTGGCGCGGGCCTGGGCCTGACC |
| | | TATGGCCCGGATGGCTTTGATATTTGGGGCCAGGGCACCatgGTGACCGTGAGCAGCAAGGGA |
| | | CCCTCGGTGTTCCCTCTCGCCCCCTCATCGAGGAGCACGTCCGAATCGACTGCGGCGCTGGGA |
| | | TGTCTCGTGAAGGACTACTTCCCCGAGCCCGTGACCGTGTCATGGAACTCAGGCGCATTGACC |
| | | TCGGGAGTGCACACGTTCCCGGCAGTGTTGCAGTCGTCGGGCCTTTACTCGCTGTCGTCCGTG |
| | | GTCACGGTGCCTTCGTCGAATTTCGGGACGCAGACTTACACATGTAATGTGGATCACAAACCG |
| | | TCCAATACCAAGGTCGATAAGACGGTCGAAAGGAAATGCTGCGTGGAATGTCCTCCCTGCCCA |
| | | GCACCGCCAGTCGCGGGTCCCAGCGTCTTTTTGTTCCCACCGAAGCCCAAGGACACACTGATG |
| | | ATCAGCCGTACGCCGGAGGTAACATGCGTAGTGGTAGATGTCTCGCATGAGGACCCTGAAGTG |
| | | CAGTTCAATTGGTATGTAGACGGCGTGGAGGTGCACAACGCCAAGACCAAGCCACGAGAAGAA |
| | | CAGTTCAACTCGACTTTTAGAGTGGTATCCGTCCTGACCGTCGTGCACCAGGACTGGCTCAAT |
| | | GGAAAGGAGTACAAATGCAAGGTATCCAACAAGGGGTTGCCAGCTCCAATCGAAAAGACCATC |
| | | TCAAAGACAAAGGGGCAGCCCAGAGAGCCCCAAGTGTATACGCTTCCACCCTCAAGGGAGGAG |
| | | ATGACAAAGAATCAGGTATCACTCACATGTTTGGTGAAAGGGTTTTATCCGAGCGATATTGCG |
| | | GTCGAGTGGGAAAGCAACGGTCAACCGGAGAACAACTATAAGACGACTCCCCCTATGCTGGAC |
| | | AGCGACGGGTCGTTCTTTCTGTATTCCAAACTCACGGTGGACAAATCGAGGTGGCAGCAAGGA |
| | | AACGTATTCTCATGCTCAGTAATGCACGAGGCCCTCCATAATCATTACACGCAGAAATCATTA |
| | | AGCTTATCGCCGGGT |
| 1406 | HC Ab62 | GAAGTGCAGCTGCTGGAAAGCGGCGGCGGCGTGGTGCAGCCGGGCCGTAGCCTGCGTCTGAGC |
| | | TGCGCGGCGAGCGGCTTTACCTTTAGCAGCTATGCGatgCATTGGGTGCGTCAGGCGCCGGGC |
| | | AAAGGCCTGGAATGGGTGGCGGTGATTAGCTATGATGGCAGCAACAAATATTATGCGGATAGC |
| | | GTGAAAGGCCGTTTTACCATTAGCCGTGATAACAGCAAAAACACCCTGAGCCTGCAGatgAAC |
| | | AGCCTGCGTGTGGAAGATACCGCGATTTATTATTGCGTGCGTGGCGCGGGCCTGGGCTATCCG |
| | | TATGGCCCGGATGGCTTTGATATTTGGGGCCAGGGCACCatgGTGACCGTGAGCAGCAAGGGA |
| | | CCCTCGGTGTTCCCTCTCGCCCCCTCATCGAGGAGCACGTCCGAATCGACTGCGGCGCTGGGA |
| | | TGTCTCGTGAAGGACTACTTCCCCGAGCCCGTGACCGTGTCATGGAACTCAGGCGCATTGACC |
| | | TCGGGAGTGCACACGTTCCCGGCAGTGTTGCAGTCGTCGGGCCTTTACTCGCTGTCGTCCGTG |
| | | GTCACGGTGCCTTCGTCGAATTTCGGGACGCAGACTTACACATGTAATGTGGATCACAAACCG |
| | | TCCAATACCAAGGTCGATAAGACGGTCGAAAGGAAATGCTGCGTGGAATGTCCTCCCTGCCCA |
| | | GCACCGCCAGTCGCGGGTCCCAGCGTCTTTTTGTTCCCACCGAAGCCCAAGGACACACTGATG |
| | | ATCAGCCGTACGCCGGAGGTAACATGCGTAGTGGTAGATGTCTCGCATGAGGACCCTGAAGTG |
| | | CAGTTCAATTGGTATGTAGACGGCGTGGAGGTGCACAACGCCAAGACCAAGCCACGAGAAGAA |
| | | CAGTTCAACTCGACTTTTAGAGTGGTATCCGTCCTGACCGTCGTGCACCAGGACTGGCTCAAT |
| | | GGAAAGGAGTACAAATGCAAGGTATCCAACAAGGGGTTGCCAGCTCCAATCGAAAAGACCATC |
| | | TCAAAGACAAAGGGGCAGCCCAGAGAGCCCCAAGTGTATACGCTTCCACCCTCAAGGGAGGAG |
| | | ATGACAAAGAATCAGGTATCACTCACATGTTTGGTGAAAGGGTTTTATCCGAGCGATATTGCG |
| | | GTCGAGTGGGAAAGCAACGGTCAACCGGAGAACAACTATAAGACGACTCCCCCTATGCTGGAC |
| | | AGCGACGGGTCGTTCTTTCTGTATTCCAAACTCACGGTGGACAAATCGAGGTGGCAGCAAGGA |
| | | AACGTATTCTCATGCTCAGTAATGCACGAGGCCCTCCATAATCATTACACGCAGAAATCATTA |
| | | AGCTTATCGCCGGGT |
| 1407 | HC Ab63 | GAAGTGCAGCTGCTGGAAAGCGGCGGCGGCGTGGTGCAGCCGGGCCGTAGCCTGCGTCTGAGC |
| | | TGCGCGGCGAGCGGCTTTACCTTTAGCAGCTATGCGatgCATTGGGTGCGTCAGGCGCCGGGC |
| | | AAAGGCCTGGAATGGGTGGCGGTGATTAGCTATGATGGCAGCAACAAATATTATGCGGATAGC |
| | | GTGAAAGGCCGTTTTACCATTAGCCGTGATAACAGCAAAAACACCCTGAGCCTGCAGatgAAC |
| | | AGCCTGCGTGTGGAAGATACCGCGATTTATTATTGCGTGCGTGGCGCGGGCCGTGGCTATCCG |
| | | CATGGCCCGGATGGCTTTGATATTTGGGGCCAGGGCACCatgGTGACCGTGAGCAGCAAGGGA |
| | | CCCTCGGTGTTCCCTCTCGCCCCCTCATCGAGGAGCACGTCCGAATCGACTGCGGCGCTGGGA |
| | | TGTCTCGTGAAGGACTACTTCCCCGAGCCCGTGACCGTGTCATGGAACTCAGGCGCATTGACC |
| | | TCGGGAGTGCACACGTTCCCGGCAGTGTTGCAGTCGTCGGGCCTTTACTCGCTGTCGTCCGTG |
| | | GTCACGGTGCCTTCGTCGAATTTCGGGACGCAGACTTACACATGTAATGTGGATCACAAACCG |
| | | TCCAATACCAAGGTCGATAAGACGGTCGAAAGGAAATGCTGCGTGGAATGTCCTCCCTGCCCA |
| | | GCACCGCCAGTCGCGGGTCCCAGCGTCTTTTTGTTCCCACCGAAGCCCAAGGACACACTGATG |
| | | ATCAGCCGTACGCCGGAGGTAACATGCGTAGTGGTAGATGTCTCGCATGAGGACCCTGAAGTG |
| | | CAGTTCAATTGGTATGTAGACGGCGTGGAGGTGCACAACGCCAAGACCAAGCCACGAGAAGAA |
| | | CAGTTCAACTCGACTTTTAGAGTGGTATCCGTCCTGACCGTCGTGCACCAGGACTGGCTCAAT |
| | | GGAAAGGAGTACAAATGCAAGGTATCCAACAAGGGGTTGCCAGCTCCAATCGAAAAGACCATC |
| | | TCAAAGACAAAGGGGCAGCCCAGAGAGCCCCAAGTGTATACGCTTCCACCCTCAAGGGAGGAG |
| | | ATGACAAAGAATCAGGTATCACTCACATGTTTGGTGAAAGGGTTTTATCCGAGCGATATTGCG |
| | | GTCGAGTGGGAAAGCAACGGTCAACCGGAGAACAACTATAAGACGACTCCCCCTATGCTGGAC |
| | | AGCGACGGGTCGTTCTTTCTGTATTCCAAACTCACGGTGGACAAATCGAGGTGGCAGCAAGGA |
| | | AACGTATTCTCATGCTCAGTAATGCACGAGGCCCTCCATAATCATTACACGCAGAAATCATTA |
| | | AGCTTATCGCCGGGT |
| 1408 | HC Ab64 | GAAGTGCAGCTGCTGGAAAGCGGCGGCGGCGTGGTGCAGCCGGGCCGTAGCCTGCGTCTGAGC |
| | | TGCGCGGCGAGCGGCTTTACCTTTAGCAGCTATGCGatgCATTGGGTGCGTCAGGCGCCGGGC |
| | | AAAGGCCTGGAATGGGTGGCGGTGATTAGCTATGATGGCAGCAACAAATATTATGCGGATAGC |
| | | GTGAAAGGCCGTTTTACCATTAGCCGTGATAACAGCAAAAACACCCTGAGCCTGCAGatgAAC |
| | | AGCCTGCGTGTGGAAGATACCGCGATTTATTATTGCGTGCGTGGCGCGGGCATTGGCTATCCG |
| | | CATGGCCCGGATGGCTTTGATATTTGGGGCCAGGGCACCatgGTGACCGTGAGCAGCAAGGGA |
| | | CCCTCGGTGTTCCCTCTCGCCCCCTCATCGAGGAGCACGTCCGAATCGACTGCGGCGCTGGGA |
| | | TGTCTCGTGAAGGACTACTTCCCCGAGCCCGTGACCGTGTCATGGAACTCAGGCGCATTGACC |
| | | TCGGGAGTGCACACGTTCCCGGCAGTGTTGCAGTCGTCGGGCCTTTACTCGCTGTCGTCCGTG |
| | | GTCACGGTGCCTTCGTCGAATTTCGGGACGCAGACTTACACATGTAATGTGGATCACAAACCG |
| | | TCCAATACCAAGGTCGATAAGACGGTCGAAAGGAAATGCTGCGTGGAATGTCCTCCCTGCCCA |
| | | GCACCGCCAGTCGCGGGTCCCAGCGTCTTTTTGTTCCCACCGAAGCCCAAGGACACACTGATG |
| | | ATCAGCCGTACGCCGGAGGTAACATGCGTAGTGGTAGATGTCTCGCATGAGGACCCTGAAGTG |
| | | CAGTTCAATTGGTATGTAGACGGCGTGGAGGTGCACAACGCCAAGACCAAGCCACGAGAAGAA |
| | | CAGTTCAACTCGACTTTTAGAGTGGTATCCGTCCTGACCGTCGTGCACCAGGACTGGCTCAAT |
| | | GGAAAGGAGTACAAATGCAAGGTATCCAACAAGGGGTTGCCAGCTCCAATCGAAAAGACCATC |
| | | TCAAAGACAAAGGGGCAGCCCAGAGAGCCCCAAGTGTATACGCTTCCACCCTCAAGGGAGGAG |
| | | ATGACAAAGAATCAGGTATCACTCACATGTTTGGTGAAAGGGTTTTATCCGAGCGATATTGCG |
| | | GTCGAGTGGGAAAGCAACGGTCAACCGGAGAACAACTATAAGACGACTCCCCCTATGCTGGAC |
| | | AGCGACGGGTCGTTCTTTCTGTATTCCAAACTCACGGTGGACAAATCGAGGTGGCAGCAAGGA |
| | | AACGTATTCTCATGCTCAGTAATGCACGAGGCCCTCCATAATCATTACACGCAGAAATCATTA |
| | | AGCTTATCGCCGGGT |
| 1409 | HC Ab65 | GAAGTGCAGCTGCTGGAAAGCGGCGGCGGCGTGGTGCAGCCGGGCCGTAGCCTGCGTCTGAGC |
| | | TGCGCGGCGAGCGGCTTTACCTTTAGCAGCTATGCGatgCATTGGGTGCGTCAGGCGCCGGGC |
| | | AAAGGCCTGGAATGGGTGGCGGTGATTAGCTATGATGGCAGCAACAAATATTATGCGGATAGC |
| | | GTGAAAGGCCGTTTTACCATTAGCCGTGATAACAGCAAAAACACCCTGAGCCTGCAGatgAAC |
| | | AGCCTGCGTGTGGAAGATACCGCGATTTATTATTGCGTGCGTGGCGCGGGCCGTGGCTATCCG |
| | | TATGGCCCGGATGGCTTTGATATTTGGGGCCAGGGCACCatgGTGACCGTGAGCAGCAAGGGA |
| | | CCCTCGGTGTTCCCTCTCGCCCCCTCATCGAGGAGCACGTCCGAATCGACTGCGGCGCTGGGA |
| | | TGTCTCGTGAAGGACTACTTCCCCGAGCCCGTGACCGTGTCATGGAACTCAGGCGCATTGACC |
| | | TCGGGAGTGCACACGTTCCCGGCAGTGTTGCAGTCGTCGGGCCTTTACTCGCTGTCGTCCGTG |
| | | GTCACGGTGCCTTCGTCGAATTTCGGGACGCAGACTTACACATGTAATGTGGATCACAAACCG |
| | | TCCAATACCAAGGTCGATAAGACGGTCGAAAGGAAATGCTGCGTGGAATGTCCTCCCTGCCCA |
| | | GCACCGCCAGTCGCGGGTCCCAGCGTCTTTTTGTTCCCACCGAAGCCCAAGGACACACTGATG |
| | | ATCAGCCGTACGCCGGAGGTAACATGCGTAGTGGTAGATGTCTCGCATGAGGACCCTGAAGTG |
| | | CAGTTCAATTGGTATGTAGACGGCGTGGAGGTGCACAACGCCAAGACCAAGCCACGAGAAGAA |
| | | CAGTTCAACTCGACTTTTAGAGTGGTATCCGTCCTGACCGTCGTGCACCAGGACTGGCTCAAT |
| | | GGAAAGGAGTACAAATGCAAGGTATCCAACAAGGGGTTGCCAGCTCCAATCGAAAAGACCATC |
| | | TCAAAGACAAAGGGGCAGCCCAGAGAGCCCCAAGTGTATACGCTTCCACCCTCAAGGGAGGAG |
| | | ATGACAAAGAATCAGGTATCACTCACATGTTTGGTGAAAGGGTTTTATCCGAGCGATATTGCG |
| | | GTCGAGTGGGAAAGCAACGGTCAACCGGAGAACAACTATAAGACGACTCCCCCTATGCTGGAC |
| | | AGCGACGGGTCGTTCTTTCTGTATTCCAAACTCACGGTGGACAAATCGAGGTGGCAGCAAGGA |
| | | AACGTATTCTCATGCTCAGTAATGCACGAGGCCCTCCATAATCATTACACGCAGAAATCATTA |
| | | AGCTTATCGCCGGGT |
| 1410 | HC Ab66 | GAAGTGCAGCTGCTGGAAAGCGGCGGCGGCGTGGTGCAGCCGGGCCGTAGCCTGCGTCTGAGC |
| | | TGCGCGGCGAGCGGCTTTACCTTTAGCAGCTATGCGatgCATTGGGTGCGTCAGGCGCCGGGC |
| | | AAAGGCCTGGAATGGGTGGCGGTGATTAGCTATGATGGCAGCAACAAATATTATGCGGATAGC |
| | | GTGAAAGGCCGTTTTACCATTAGCCGTGATAACAGCAAAAACACCCTGAGCCTGCAGatgAAC |
| | | AGCCTGCGTGTGGAAGATACCGCGATTTATTATTGCGTGCGTGGCGCGGGCCTGGGCTTTCCG |
| | | TTTGGCCCGGATGGCTTTGATATTTGGGGCCAGGGCACCatgGTGACCGTGAGCAGCAAGGGA |
| | | CCCTCGGTGTTCCCTCTCGCCCCCTCATCGAGGAGCACGTCCGAATCGACTGCGGCGCTGGGA |
| | | TGTCTCGTGAAGGACTACTTCCCCGAGCCCGTGACCGTGTCATGGAACTCAGGCGCATTGACC |
| | | TCGGGAGTGCACACGTTCCCGGCAGTGTTGCAGTCGTCGGGCCTTTACTCGCTGTCGTCCGTG |
| | | GTCACGGTGCCTTCGTCGAATTTCGGGACGCAGACTTACACATGTAATGTGGATCACAAACCG |
| | | TCCAATACCAAGGTCGATAAGACGGTCGAAAGGAAATGCTGCGTGGAATGTCCTCCCTGCCCA |
| | | GCACCGCCAGTCGCGGGTCCCAGCGTCTTTTTGTTCCCACCGAAGCCCAAGGACACACTGATG |
| | | ATCAGCCGTACGCCGGAGGTAACATGCGTAGTGGTAGATGTCTCGCATGAGGACCCTGAAGTG |
| | | CAGTTCAATTGGTATGTAGACGGCGTGGAGGTGCACAACGCCAAGACCAAGCCACGAGAAGAA |
| | | CAGTTCAACTCGACTTTTAGAGTGGTATCCGTCCTGACCGTCGTGCACCAGGACTGGCTCAAT |
| | | GGAAAGGAGTACAAATGCAAGGTATCCAACAAGGGGTTGCCAGCTCCAATCGAAAAGACCATC |
| | | TCAAAGACAAAGGGGCAGCCCAGAGAGCCCCAAGTGTATACGCTTCCACCCTCAAGGGAGGAG |
| | | ATGACAAAGAATCAGGTATCACTCACATGTTTGGTGAAAGGGTTTTATCCGAGCGATATTGCG |
| | | GTCGAGTGGGAAAGCAACGGTCAACCGGAGAACAACTATAAGACGACTCCCCCTATGCTGGAC |
| | | AGCGACGGGTCGTTCTTTCTGTATTCCAAACTCACGGTGGACAAATCGAGGTGGCAGCAAGGA |
| | | AACGTATTCTCATGCTCAGTAATGCACGAGGCCCTCCATAATCATTACACGCAGAAATCATTA |
| | | AGCTTATCGCCGGGT |
| 1411 | HC Ab67 | GAAGTGCAGCTGCTGGAAAGCGGCGGCGGCGTGGTGCAGCCGGGCCGTAGCCTGCGTCTGAGC |
| | | TGCGCGGCGAGCGGCTTTACCTTTAGCAGCTATGCGatgCATTGGGTGCGTCAGGCGCCGGGC |
| | | AAAGGCCTGGAATGGGTGGCGGTGATTAGCTATGATGGCAGCAACAAATATTATGCGGATAGC |
| | | GTGAAAGGCCGTTTTACCATTAGCCGTGATAACAGCAAAAACACCCTGAGCCTGCAGatgAAC |
| | | AGCCTGCGTGTGGAAGATACCGCGATTTATTATTGCGTGCGTGGCGCGGGCCGTGGCTTTCCG |
| | | TATGGCCCGGATGGCTTTGATATTTGGGGCCAGGGCACCatgGTGACCGTGAGCAGCAAGGGA |
| | | CCCTCGGTGTTCCCTCTCGCCCCCTCATCGAGGAGCACGTCCGAATCGACTGCGGCGCTGGGA |
| | | TGTCTCGTGAAGGACTACTTCCCCGAGCCCGTGACCGTGTCATGGAACTCAGGCGCATTGACC |
| | | TCGGGAGTGCACACGTTCCCGGCAGTGTTGCAGTCGTCGGGCCTTTACTCGCTGTCGTCCGTG |
| | | GTCACGGTGCCTTCGTCGAATTTCGGGACGCAGACTTACACATGTAATGTGGATCACAAACCG |
| | | TCCAATACCAAGGTCGATAAGACGGTCGAAAGGAAATGCTGCGTGGAATGTCCTCCCTGCCCA |
| | | GCACCGCCAGTCGCGGGTCCCAGCGTCTTTTTGTTCCCACCGAAGCCCAAGGACACACTGATG |
| | | ATCAGCCGTACGCCGGAGGTAACATGCGTAGTGGTAGATGTCTCGCATGAGGACCCTGAAGTG |
| | | CAGTTCAATTGGTATGTAGACGGCGTGGAGGTGCACAACGCCAAGACCAAGCCACGAGAAGAA |
| | | CAGTTCAACTCGACTTTTAGAGTGGTATCCGTCCTGACCGTCGTGCACCAGGACTGGCTCAAT |
| | | GGAAAGGAGTACAAATGCAAGGTATCCAACAAGGGGTTGCCAGCTCCAATCGAAAAGACCATC |
| | | TCAAAGACAAAGGGGCAGCCCAGAGAGCCCCAAGTGTATACGCTTCCACCCTCAAGGGAGGAG |
| | | ATGACAAAGAATCAGGTATCACTCACATGTTTGGTGAAAGGGTTTTATCCGAGCGATATTGCG |
| | | GTCGAGTGGGAAAGCAACGGTCAACCGGAGAACAACTATAAGACGACTCCCCCTATGCTGGAC |
| | | AGCGACGGGTCGTTCTTTCTGTATTCCAAACTCACGGTGGACAAATCGAGGTGGCAGCAAGGA |
| | | AACGTATTCTCATGCTCAGTAATGCACGAGGCCCTCCATAATCATTACACGCAGAAATCATTA |
| | | AGCTTATCGCCGGGT |
| 1412 | HC Ab68 | GAAGTGCAGCTGCTGGAAAGCGGCGGCGGCGTGGTGCAGCCGGGCCGTAGCCTGCGTCTGAGC |
| | | TGCGCGGCGAGCGGCTTTACCTTTAGCAGCTATGCGatgCATTGGGTGCGTCAGGCGCCGGGC |
| | | AAAGGCCTGGAATGGGTGGCGGTGATTAGCTATGATGGCAGCAACAAATATTATGCGGATAGC |
| | | GTGAAAGGCCGTTTTACCATTAGCCGTGATAACAGCAAAAACACCCTGAGCCTGCAGatgAAC |
| | | AGCCTGCGTGTGGAAGATACCGCGATTTATTATTGCGTGCGTGGCGCGGGCCTGGGCTATCCG |
| | | AACGGCCCGGATGGCTTTGATATTTGGGGCCAGGGCACCatgGTGACCGTGAGCAGCAAGGGA |
| | | CCCTCGGTGTTCCCTCTCGCCCCCTCATCGAGGAGCACGTCCGAATCGACTGCGGCGCTGGGA |
| | | TGTCTCGTGAAGGACTACTTCCCCGAGCCCGTGACCGTGTCATGGAACTCAGGCGCATTGACC |
| | | TCGGGAGTGCACACGTTCCCGGCAGTGTTGCAGTCGTCGGGCCTTTACTCGCTGTCGTCCGTG |
| | | GTCACGGTGCCTTCGTCGAATTTCGGGACGCAGACTTACACATGTAATGTGGATCACAAACCG |
| | | TCCAATACCAAGGTCGATAAGACGGTCGAAAGGAAATGCTGCGTGGAATGTCCTCCCTGCCCA |
| | | GCACCGCCAGTCGCGGGTCCCAGCGTCTTTTTGTTCCCACCGAAGCCCAAGGACACACTGATG |
| | | ATCAGCCGTACGCCGGAGGTAACATGCGTAGTGGTAGATGTCTCGCATGAGGACCCTGAAGTG |
| | | CAGTTCAATTGGTATGTAGACGGCGTGGAGGTGCACAACGCCAAGACCAAGCCACGAGAAGAA |
| | | CAGTTCAACTCGACTTTTAGAGTGGTATCCGTCCTGACCGTCGTGCACCAGGACTGGCTCAAT |
| | | GGAAAGGAGTACAAATGCAAGGTATCCAACAAGGGGTTGCCAGCTCCAATCGAAAAGACCATC |
| | | TCAAAGACAAAGGGGCAGCCCAGAGAGCCCCAAGTGTATACGCTTCCACCCTCAAGGGAGGAG |
| | | ATGACAAAGAATCAGGTATCACTCACATGTTTGGTGAAAGGGTTTTATCCGAGCGATATTGCG |
| | | GTCGAGTGGGAAAGCAACGGTCAACCGGAGAACAACTATAAGACGACTCCCCCTATGCTGGAC |
| | | AGCGACGGGTCGTTCTTTCTGTATTCCAAACTCACGGTGGACAAATCGAGGTGGCAGCAAGGA |
| | | AACGTATTCTCATGCTCAGTAATGCACGAGGCCCTCCATAATCATTACACGCAGAAATCATTA |
| | | AGCTTATCGCCGGGT |
| 1413 | HC Ab69 | GAAGTGCAGCTGCTGGAAAGCGGCGGCGGCGTGGTGCAGCCGGGCCGTAGCCTGCGTCTGAGC |
| | | TGCGCGGCGAGCGGCTTTACCTTTAGCAGCTATGCGatgCATTGGGTGCGTCAGGCGCCGGGC |
| | | AAAGGCCTGGAATGGGTGGCGGTGATTAGCTATGATGGCAGCAACAAATATTATGCGGATAGC |
| | | GTGAAAGGCCGTTTTACCATTAGCCGTGATAACAGCAAAAACACCCTGAGCCTGCAGatgAAC |
| | | AGCCTGCGTGTGGAAGATACCGCGATTTATTATTGCGTGCGTGGCGCGGGCCAGGGCTTTCCG |
| | | TATGGCCCGGATGGCTTTGATATTTGGGGCCAGGGCACCatgGTGACCGTGAGCAGCAAGGGA |
| | | CCCTCGGTGTTCCCTCTCGCCCCCTCATCGAGGAGCACGTCCGAATCGACTGCGGCGCTGGGA |
| | | TGTCTCGTGAAGGACTACTTCCCCGAGCCCGTGACCGTGTCATGGAACTCAGGCGCATTGACC |
| | | TCGGGAGTGCACACGTTCCCGGCAGTGTTGCAGTCGTCGGGCCTTTACTCGCTGTCGTCCGTG |
| | | GTCACGGTGCCTTCGTCGAATTTCGGGACGCAGACTTACACATGTAATGTGGATCACAAACCG |
| | | TCCAATACCAAGGTCGATAAGACGGTCGAAAGGAAATGCTGCGTGGAATGTCCTCCCTGCCCA |
| | | GCACCGCCAGTCGCGGGTCCCAGCGTCTTTTTGTTCCCACCGAAGCCCAAGGACACACTGATG |
| | | ATCAGCCGTACGCCGGAGGTAACATGCGTAGTGGTAGATGTCTCGCATGAGGACCCTGAAGTG |
| | | CAGTTCAATTGGTATGTAGACGGCGTGGAGGTGCACAACGCCAAGACCAAGCCACGAGAAGAA |
| | | CAGTTCAACTCGACTTTTAGAGTGGTATCCGTCCTGACCGTCGTGCACCAGGACTGGCTCAAT |
| | | GGAAAGGAGTACAAATGCAAGGTATCCAACAAGGGGTTGCCAGCTCCAATCGAAAAGACCATC |
| | | TCAAAGACAAAGGGGCAGCCCAGAGAGCCCCAAGTGTATACGCTTCCACCCTCAAGGGAGGAG |
| | | ATGACAAAGAATCAGGTATCACTCACATGTTTGGTGAAAGGGTTTTATCCGAGCGATATTGCG |
| | | GTCGAGTGGGAAAGCAACGGTCAACCGGAGAACAACTATAAGACGACTCCCCCTATGCTGGAC |
| | | AGCGACGGGTCGTTCTTTCTGTATTCCAAACTCACGGTGGACAAATCGAGGTGGCAGCAAGGA |
| | | AACGTATTCTCATGCTCAGTAATGCACGAGGCCCTCCATAATCATTACACGCAGAAATCATTA |
| | | AGCTTATCGCCGGGT |
| 1414 | HC Ab70 | GAAGTGCAGCTGCTGGAAAGCGGCGGCGGCGTGGTGCAGCCGGGCCGTAGCCTGCGTCTGAGC |
| | | TGCGCGGCGAGCGGCTTTACCTTTAGCAGCTATGCGatgCATTGGGTGCGTCAGGCGCCGGGC |
| | | AAAGGCCTGGAATGGGTGGCGGTGATTAGCTATGATGGCAGCAACAAATATTATGCGGATAGC |
| | | GTGAAAGGCCGTTTTACCATTAGCCGTGATAACAGCAAAAACACCCTGAGCCTGCAGatgAAC |
| | | AGCCTGCGTGTGGAAGATACCGCGATTTATTATTGCGTGCGTGGCGCGGGCCAGGGCTATCCG |
| | | TATGGCCCGGATGGCTTTGATATTTGGGGCCAGGGCACCatgGTGACCGTGAGCAGCAAGGGA |
| | | CCCTCGGTGTTCCCTCTCGCCCCCTCATCGAGGAGCACGTCCGAATCGACTGCGGCGCTGGGA |
| | | TGTCTCGTGAAGGACTACTTCCCCGAGCCCGTGACCGTGTCATGGAACTCAGGCGCATTGACC |
| | | TCGGGAGTGCACACGTTCCCGGCAGTGTTGCAGTCGTCGGGCCTTTACTCGCTGTCGTCCGTG |
| | | GTCACGGTGCCTTCGTCGAATTTCGGGACGCAGACTTACACATGTAATGTGGATCACAAACCG |
| | | TCCAATACCAAGGTCGATAAGACGGTCGAAAGGAAATGCTGCGTGGAATGTCCTCCCTGCCCA |
| | | GCACCGCCAGTCGCGGGTCCCAGCGTCTTTTTGTTCCCACCGAAGCCCAAGGACACACTGATG |
| | | ATCAGCCGTACGCCGGAGGTAACATGCGTAGTGGTAGATGTCTCGCATGAGGACCCTGAAGTG |
| | | CAGTTCAATTGGTATGTAGACGGCGTGGAGGTGCACAACGCCAAGACCAAGCCACGAGAAGAA |
| | | CAGTTCAACTCGACTTTTAGAGTGGTATCCGTCCTGACCGTCGTGCACCAGGACTGGCTCAAT |
| | | GGAAAGGAGTACAAATGCAAGGTATCCAACAAGGGGTTGCCAGCTCCAATCGAAAAGACCATC |
| | | TCAAAGACAAAGGGGCAGCCCAGAGAGCCCCAAGTGTATACGCTTCCACCCTCAAGGGAGGAG |
| | | ATGACAAAGAATCAGGTATCACTCACATGTTTGGTGAAAGGGTTTTATCCGAGCGATATTGCG |
| | | GTCGAGTGGGAAAGCAACGGTCAACCGGAGAACAACTATAAGACGACTCCCCCTATGCTGGAC |
| | | AGCGACGGGTCGTTCTTTCTGTATTCCAAACTCACGGTGGACAAATCGAGGTGGCAGCAAGGA |
| | | AACGTATTCTCATGCTCAGTAATGCACGAGGCCCTCCATAATCATTACACGCAGAAATCATTA |
| | | AGCTTATCGCCGGGT |
| 1415 | HC Ab71 | GAAGTGCAGCTGCTGGAAAGCGGCGGCGGCGTGGTGCAGCCGGGCCGTAGCCTGCGTCTGAGC |
| | | TGCGCGGCGAGCGGCTTTACCTTTAGCAGCTATGCGatgCATTGGGTGCGTCAGGCGCCGGGC |
| | | AAAGGCCTGGAATGGGTGGCGGTGATTAGCTATGATGGCAGCAACAAATATTATGCGGATAGC |
| | | GTGAAAGGCCGTTTTACCATTAGCCGTGATAACAGCAAAAACACCCTGAGCCTGCAGatgAAC |
| | | AGCCTGCGTGTGGAAGATACCGCGATTTATTATTGCGTGCGTGGCGCGGGCACCGGCTTTACC |
| | | TATGGCCCGGATGGCTTTGATATTTGGGGCCAGGGCACCatgGTGACCGTGAGCAGCAAGGGA |
| | | CCCTCGGTGTTCCCTCTCGCCCCCTCATCGAGGAGCACGTCCGAATCGACTGCGGCGCTGGGA |
| | | TGTCTCGTGAAGGACTACTTCCCCGAGCCCGTGACCGTGTCATGGAACTCAGGCGCATTGACC |
| | | TCGGGAGTGCACACGTTCCCGGCAGTGTTGCAGTCGTCGGGCCTTTACTCGCTGTCGTCCGTG |
| | | GTCACGGTGCCTTCGTCGAATTTCGGGACGCAGACTTACACATGTAATGTGGATCACAAACCG |
| | | TCCAATACCAAGGTCGATAAGACGGTCGAAAGGAAATGCTGCGTGGAATGTCCTCCCTGCCCA |
| | | GCACCGCCAGTCGCGGGTCCCAGCGTCTTTTTGTTCCCACCGAAGCCCAAGGACACACTGATG |
| | | ATCAGCCGTACGCCGGAGGTAACATGCGTAGTGGTAGATGTCTCGCATGAGGACCCTGAAGTG |
| | | CAGTTCAATTGGTATGTAGACGGCGTGGAGGTGCACAACGCCAAGACCAAGCCACGAGAAGAA |
| | | CAGTTCAACTCGACTTTTAGAGTGGTATCCGTCCTGACCGTCGTGCACCAGGACTGGCTCAAT |
| | | GGAAAGGAGTACAAATGCAAGGTATCCAACAAGGGGTTGCCAGCTCCAATCGAAAAGACCATC |
| | | TCAAAGACAAAGGGGCAGCCCAGAGAGCCCCAAGTGTATACGCTTCCACCCTCAAGGGAGGAG |
| | | ATGACAAAGAATCAGGTATCACTCACATGTTTGGTGAAAGGGTTTTATCCGAGCGATATTGCG |
| | | GTCGAGTGGGAAAGCAACGGTCAACCGGAGAACAACTATAAGACGACTCCCCCTATGCTGGAC |
| | | AGCGACGGGTCGTTCTTTCTGTATTCCAAACTCACGGTGGACAAATCGAGGTGGCAGCAAGGA |
| | | AACGTATTCTCATGCTCAGTAATGCACGAGGCCCTCCATAATCATTACACGCAGAAATCATTA |
| | | AGCTTATCGCCGGGT |
| 1416 | HC Ab72 | GAAGTGCAGCTGCTGGAAAGCGGCGGCGGCGTGGTGCAGCCGGGCCGTAGCCTGCGTCTGAGC |
| | | TGCGCGGCGAGCGGCTTTACCTTTAGCAGCTATGCGatgCATTGGGTGCGTCAGGCGCCGGGC |
| | | AAAGGCCTGGAATGGGTGGCGGTGATTAGCTATGATGGCAGCAACAAATATTATGCGGATAGC |
| | | GTGAAAGGCCGTTTTACCATTAGCCGTGATAACAGCAAAAACACCCTGAGCCTGCAGatgAAC |
| | | AGCCTGCGTGTGGAAGATACCGCGATTTATTATTGCGTGCGTGGCGCGGGCatgGGCCTGACC |
| | | TATGGCCCGGATGGCTTTGATATTTGGGGCCAGGGCACCatgGTGACCGTGAGCAGCAAGGGA |
| | | CCCTCGGTGTTCCCTCTCGCCCCCTCATCGAGGAGCACGTCCGAATCGACTGCGGCGCTGGGA |
| | | TGTCTCGTGAAGGACTACTTCCCCGAGCCCGTGACCGTGTCATGGAACTCAGGCGCATTGACC |
| | | TCGGGAGTGCACACGTTCCCGGCAGTGTTGCAGTCGTCGGGCCTTTACTCGCTGTCGTCCGTG |
| | | GTCACGGTGCCTTCGTCGAATTTCGGGACGCAGACTTACACATGTAATGTGGATCACAAACCG |
| | | TCCAATACCAAGGTCGATAAGACGGTCGAAAGGAAATGCTGCGTGGAATGTCCTCCCTGCCCA |
| | | GCACCGCCAGTCGCGGGTCCCAGCGTCTTTTTGTTCCCACCGAAGCCCAAGGACACACTGATG |
| | | ATCAGCCGTACGCCGGAGGTAACATGCGTAGTGGTAGATGTCTCGCATGAGGACCCTGAAGTG |
| | | CAGTTCAATTGGTATGTAGACGGCGTGGAGGTGCACAACGCCAAGACCAAGCCACGAGAAGAA |
| | | CAGTTCAACTCGACTTTTAGAGTGGTATCCGTCCTGACCGTCGTGCACCAGGACTGGCTCAAT |
| | | GGAAAGGAGTACAAATGCAAGGTATCCAACAAGGGGTTGCCAGCTCCAATCGAAAAGACCATC |
| | | TCAAAGACAAAGGGGCAGCCCAGAGAGCCCCAAGTGTATACGCTTCCACCCTCAAGGGAGGAG |
| | | ATGACAAAGAATCAGGTATCACTCACATGTTTGGTGAAAGGGTTTTATCCGAGCGATATTGCG |
| | | GTCGAGTGGGAAAGCAACGGTCAACCGGAGAACAACTATAAGACGACTCCCCCTATGCTGGAC |
| | | AGCGACGGGTCGTTCTTTCTGTATTCCAAACTCACGGTGGACAAATCGAGGTGGCAGCAAGGA |
| | | AACGTATTCTCATGCTCAGTAATGCACGAGGCCCTCCATAATCATTACACGCAGAAATCATTA |
| | | AGCTTATCGCCGGGT |
| 1417 | HC Ab73 | GAAGTGCAGCTGCTGGAAAGCGGCGGCGGCGTGGTGCAGCCGGGCCGTAGCCTGCGTCTGAGC |
| | | TGCGCGGCGAGCGGCTTTACCTTTAGCAGCTATGCGatgCATTGGGTGCGTCAGGCGCCGGGC |
| | | AAAGGCCTGGAATGGGTGGCGGTGATTAGCTATGATGGCAGCAACAAATATTATGCGGATAGC |
| | | GTGAAAGGCCGTTTTACCATTAGCCGTGATAACAGCAAAAACACCCTGAGCCTGCAGatgAAC |
| | | AGCCTGCGTGTGGAAGATACCGCGATTTATTATTGCGTGCGTGGCGCGGGCCTGGGCTTTCCG |
| | | TATGGCCCGGATGGCTTTGATATTTGGGGCCAGGGCACCatgGTGACCGTGAGCAGCAAGGGA |
| | | CCCTCGGTGTTCCCTCTCGCCCCCTCATCGAGGAGCACGTCCGAATCGACTGCGGCGCTGGGA |
| | | TGTCTCGTGAAGGACTACTTCCCCGAGCCCGTGACCGTGTCATGGAACTCAGGCGCATTGACC |
| | | TCGGGAGTGCACACGTTCCCGGCAGTGTTGCAGTCGTCGGGCCTTTACTCGCTGTCGTCCGTG |
| | | GTCACGGTGCCTTCGTCGAATTTCGGGACGCAGACTTACACATGTAATGTGGATCACAAACCG |
| | | TCCAATACCAAGGTCGATAAGACGGTCGAAAGGAAATGCTGCGTGGAATGTCCTCCCTGCCCA |
| | | GCACCGCCAGTCGCGGGTCCCAGCGTCTTTTTGTTCCCACCGAAGCCCAAGGACACACTGATG |
| | | ATCAGCCGTACGCCGGAGGTAACATGCGTAGTGGTAGATGTCTCGCATGAGGACCCTGAAGTG |
| | | CAGTTCAATTGGTATGTAGACGGCGTGGAGGTGCACAACGCCAAGACCAAGCCACGAGAAGAA |
| | | CAGTTCAACTCGACTTTTAGAGTGGTATCCGTCCTGACCGTCGTGCACCAGGACTGGCTCAAT |
| | | GGAAAGGAGTACAAATGCAAGGTATCCAACAAGGGGTTGCCAGCTCCAATCGAAAAGACCATC |
| | | TCAAAGACAAAGGGGCAGCCCAGAGAGCCCCAAGTGTATACGCTTCCACCCTCAAGGGAGGAG |
| | | ATGACAAAGAATCAGGTATCACTCACATGTTTGGTGAAAGGGTTTTATCCGAGCGATATTGCG |
| | | GTCGAGTGGGAAAGCAACGGTCAACCGGAGAACAACTATAAGACGACTCCCCCTATGCTGGAC |
| | | AGCGACGGGTCGTTCTTTCTGTATTCCAAACTCACGGTGGACAAATCGAGGTGGCAGCAAGGA |
| | | AACGTATTCTCATGCTCAGTAATGCACGAGGCCCTCCATAATCATTACACGCAGAAATCATTA |
| | | AGCTTATCGCCGGGT |
| 1418 | HC Ab74 | GAAGTGCAGCTGCTGGAAAGCGGCGGCGGCGTGGTGCAGCCGGGCCGTAGCCTGCGTCTGAGC |
| | | TGCGCGGCGAGCGGCTTTACCTTTAGCAGCTATGCGatgCATTGGGTGCGTCAGGCGCCGGGC |
| | | AAAGGCCTGGAATGGGTGGCGGTGATTAGCTATGATGGCAGCAACAAATATTATGCGGATAGC |
| | | GTGAAAGGCCGTTTTACCATTAGCCGTGATAACAGCAAAAACACCCTGAGCCTGCAGatgAAC |
| | | AGCCTGCGTGTGGAAGATACCGCGATTTATTATTGCGTGCGTGGCGCGGGCCTGGGCTGGGCG |
| | | TATGGCCCGGATGGCTTTGATATTTGGGGCCAGGGCACCatgGTGACCGTGAGCAGCAAGGGA |
| | | CCCTCGGTGTTCCCTCTCGCCCCCTCATCGAGGAGCACGTCCGAATCGACTGCGGCGCTGGGA |
| | | TGTCTCGTGAAGGACTACTTCCCCGAGCCCGTGACCGTGTCATGGAACTCAGGCGCATTGACC |
| | | TCGGGAGTGCACACGTTCCCGGCAGTGTTGCAGTCGTCGGGCCTTTACTCGCTGTCGTCCGTG |
| | | GTCACGGTGCCTTCGTCGAATTTCGGGACGCAGACTTACACATGTAATGTGGATCACAAACCG |
| | | TCCAATACCAAGGTCGATAAGACGGTCGAAAGGAAATGCTGCGTGGAATGTCCTCCCTGCCCA |
| | | GCACCGCCAGTCGCGGGTCCCAGCGTCTTTTTGTTCCCACCGAAGCCCAAGGACACACTGATG |
| | | ATCAGCCGTACGCCGGAGGTAACATGCGTAGTGGTAGATGTCTCGCATGAGGACCCTGAAGTG |
| | | CAGTTCAATTGGTATGTAGACGGCGTGGAGGTGCACAACGCCAAGACCAAGCCACGAGAAGAA |
| | | CAGTTCAACTCGACTTTTAGAGTGGTATCCGTCCTGACCGTCGTGCACCAGGACTGGCTCAAT |
| | | GGAAAGGAGTACAAATGCAAGGTATCCAACAAGGGGTTGCCAGCTCCAATCGAAAAGACCATC |
| | | TCAAAGACAAAGGGGCAGCCCAGAGAGCCCCAAGTGTATACGCTTCCACCCTCAAGGGAGGAG |
| | | ATGACAAAGAATCAGGTATCACTCACATGTTTGGTGAAAGGGTTTTATCCGAGCGATATTGCG |
| | | GTCGAGTGGGAAAGCAACGGTCAACCGGAGAACAACTATAAGACGACTCCCCCTATGCTGGAC |
| | | AGCGACGGGTCGTTCTTTCTGTATTCCAAACTCACGGTGGACAAATCGAGGTGGCAGCAAGGA |
| | | AACGTATTCTCATGCTCAGTAATGCACGAGGCCCTCCATAATCATTACACGCAGAAATCATTA |
| | | AGCTTATCGCCGGGT |
| 1419 | HC Ab75 | GAAGTGCAGCTGCTGGAAAGCGGCGGCGGCGTGGTGCAGCCGGGCCGTAGCCTGCGTCTGAGC |
| | | TGCGCGGCGAGCGGCTTTACCTTTAGCAGCTATGCGatgCATTGGGTGCGTCAGGCGCCGGGC |
| | | AAAGGCCTGGAATGGGTGGCGGTGATTAGCTATGATGGCAGCAACAAATATTATGCGGATAGC |
| | | GTGAAAGGCCGTTTTACCATTAGCCGTGATAACAGCAAAAACACCCTGAGCCTGCAGatgAAC |
| | | AGCCTGCGTGTGGAAGATACCGCGATTTATTATTGCGTGCGTGGCGCGGGCCGTGGCTATCCG |
| | | TATGGCCCGGATGGCTTTGATATTTGGGGCCAGGGCACCatgGTGACCGTGAGCAGCAAGGGA |
| | | CCCTCGGTGTTCCCTCTCGCCCCCTCATCGAGGAGCACGTCCGAATCGACTGCGGCGCTGGGA |
| | | TGTCTCGTGAAGGACTACTTCCCCGAGCCCGTGACCGTGTCATGGAACTCAGGCGCATTGACC |
| | | TCGGGAGTGCACACGTTCCCGGCAGTGTTGCAGTCGTCGGGCCTTTACTCGCTGTCGTCCGTG |
| | | GTCACGGTGCCTTCGTCGAATTTCGGGACGCAGACTTACACATGTAATGTGGATCACAAACCG |
| | | TCCAATACCAAGGTCGATAAGACGGTCGAAAGGAAATGCTGCGTGGAATGTCCTCCCTGCCCA |
| | | GCACCGCCAGTCGCGGGTCCCAGCGTCTTTTTGTTCCCACCGAAGCCCAAGGACACACTGATG |
| | | ATCAGCCGTACGCCGGAGGTAACATGCGTAGTGGTAGATGTCTCGCATGAGGACCCTGAAGTG |
| | | CAGTTCAATTGGTATGTAGACGGCGTGGAGGTGCACAACGCCAAGACCAAGCCACGAGAAGAA |
| | | CAGTTCAACTCGACTTTTAGAGTGGTATCCGTCCTGACCGTCGTGCACCAGGACTGGCTCAAT |
| | | GGAAAGGAGTACAAATGCAAGGTATCCAACAAGGGGTTGCCAGCTCCAATCGAAAAGACCATC |
| | | TCAAAGACAAAGGGGCAGCCCAGAGAGCCCCAAGTGTATACGCTTCCACCCTCAAGGGAGGAG |
| | | ATGACAAAGAATCAGGTATCACTCACATGTTTGGTGAAAGGGTTTTATCCGAGCGATATTGCG |
| | | GTCGAGTGGGAAAGCAACGGTCAACCGGAGAACAACTATAAGACGACTCCCCCTATGCTGGAC |
| | | AGCGACGGGTCGTTCTTTCTGTATTCCAAACTCACGGTGGACAAATCGAGGTGGCAGCAAGGA |
| | | AACGTATTCTCATGCTCAGTAATGCACGAGGCCCTCCATAATCATTACACGCAGAAATCATTA |
| | | AGCTTATCGCCGGGT |
| 1420 | HC Ab76 | GAAGTGCAGCTGCTGGAAAGCGGCGGCGGCGTGGTGCAGCCGGGCCGTAGCCTGCGTCTGAGC |
| | | TGCGCGGCGAGCGGCTTTGATTTTGCGGGCTATGCGatgCATTGGGTGCGTCAGGCGCCGGGC |
| | | AAAGGCCTGGAATGGGTGGCGGTGATTAGCTATGATGGCAGCAACAAATATTATGCGGATAGC |
| | | GTGAAAGGCCGTTTTACCATTAGCCGTGATAACAGCAAAAACACCCTGAGCCTGCAGatgAAC |
| | | AGCCTGCGTGTGGAAGATACCGCGATTTATTATTGCGTGCGTGGCGCGGGCCGTGGCCTGACC |
| | | TATGGCCCGGATGGCTTTGATATTTGGGGCCAGGGCACCatgGTGACCGTGAGCAGCAAGGGA |
| | | CCCTCGGTGTTCCCTCTCGCCCCCTCATCGAGGAGCACGTCCGAATCGACTGCGGCGCTGGGA |
| | | TGTCTCGTGAAGGACTACTTCCCCGAGCCCGTGACCGTGTCATGGAACTCAGGCGCATTGACC |
| | | TCGGGAGTGCACACGTTCCCGGCAGTGTTGCAGTCGTCGGGCCTTTACTCGCTGTCGTCCGTG |
| | | GTCACGGTGCCTTCGTCGAATTTCGGGACGCAGACTTACACATGTAATGTGGATCACAAACCG |
| | | TCCAATACCAAGGTCGATAAGACGGTCGAAAGGAAATGCTGCGTGGAATGTCCTCCCTGCCCA |
| | | GCACCGCCAGTCGCGGGTCCCAGCGTCTTTTTGTTCCCACCGAAGCCCAAGGACACACTGATG |
| | | ATCAGCCGTACGCCGGAGGTAACATGCGTAGTGGTAGATGTCTCGCATGAGGACCCTGAAGTG |
| | | CAGTTCAATTGGTATGTAGACGGCGTGGAGGTGCACAACGCCAAGACCAAGCCACGAGAAGAA |
| | | CAGTTCAACTCGACTTTTAGAGTGGTATCCGTCCTGACCGTCGTGCACCAGGACTGGCTCAAT |
| | | GGAAAGGAGTACAAATGCAAGGTATCCAACAAGGGGTTGCCAGCTCCAATCGAAAAGACCATC |
| | | TCAAAGACAAAGGGGCAGCCCAGAGAGCCCCAAGTGTATACGCTTCCACCCTCAAGGGAGGAG |
| | | ATGACAAAGAATCAGGTATCACTCACATGTTTGGTGAAAGGGTTTTATCCGAGCGATATTGCG |
| | | GTCGAGTGGGAAAGCAACGGTCAACCGGAGAACAACTATAAGACGACTCCCCCTATGCTGGAC |
| | | AGCGACGGGTCGTTCTTTCTGTATTCCAAACTCACGGTGGACAAATCGAGGTGGCAGCAAGGA |
| | | AACGTATTCTCATGCTCAGTAATGCACGAGGCCCTCCATAATCATTACACGCAGAAATCATTA |
| | | AGCTTATCGCCGGGT |
| 1421 | HC Ab77 | GAAGTGCAGCTGCTGGAAAGCGGCGGCGGCGTGGTGCAGCCGGGCCGTAGCCTGCGTCTGAGC |
| | | TGCGCGGCGAGCGGCTTTACCTTTAGCAGCTATGCGatgCATTGGGTGCGTCAGGCGCCGGGC |
| | | AAAGGCCTGGAATGGGTGGCGGTGATTAGCTATGATGGCAGCAACAAATATTATGCGGATAGC |
| | | GTGAAAGGCCGTTTTACCATTAGCCGTGATAACAGCAAAAACACCCTGAGCCTGCAGatgAAC |
| | | AGCCTGCGTGTGGAAGATACCGCGATTTATTATTGCGTGCGTGGCGCGGGCCTGGGCCTGACC |
| | | TATGGCCCGGATGGCTTTGATATTTGGGGCCAGGGCACCatgGTGACCGTGAGCAGCAAGGGA |
| | | CCCTCGGTGTTCCCTCTCGCCCCCTCATCGAGGAGCACGTCCGAATCGACTGCGGCGCTGGGA |
| | | TGTCTCGTGAAGGACTACTTCCCCGAGCCCGTGACCGTGTCATGGAACTCAGGCGCATTGACC |
| | | TCGGGAGTGCACACGTTCCCGGCAGTGTTGCAGTCGTCGGGCCTTTACTCGCTGTCGTCCGTG |
| | | GTCACGGTGCCTTCGTCGAATTTCGGGACGCAGACTTACACATGTAATGTGGATCACAAACCG |
| | | TCCAATACCAAGGTCGATAAGACGGTCGAAAGGAAATGCTGCGTGGAATGTCCTCCCTGCCCA |
| | | GCACCGCCAGTCGCGGGTCCCAGCGTCTTTTTGTTCCCACCGAAGCCCAAGGACACACTGATG |
| | | ATCAGCCGTACGCCGGAGGTAACATGCGTAGTGGTAGATGTCTCGCATGAGGACCCTGAAGTG |
| | | CAGTTCAATTGGTATGTAGACGGCGTGGAGGTGCACAACGCCAAGACCAAGCCACGAGAAGAA |
| | | CAGTTCAACTCGACTTTTAGAGTGGTATCCGTCCTGACCGTCGTGCACCAGGACTGGCTCAAT |
| | | GGAAAGGAGTACAAATGCAAGGTATCCAACAAGGGGTTGCCAGCTCCAATCGAAAAGACCATC |
| | | TCAAAGACAAAGGGGCAGCCCAGAGAGCCCCAAGTGTATACGCTTCCACCCTCAAGGGAGGAG |
| | | ATGACAAAGAATCAGGTATCACTCACATGTTTGGTGAAAGGGTTTTATCCGAGCGATATTGCG |
| | | GTCGAGTGGGAAAGCAACGGTCAACCGGAGAACAACTATAAGACGACTCCCCCTATGCTGGAC |
| | | AGCGACGGGTCGTTCTTTCTGTATTCCAAACTCACGGTGGACAAATCGAGGTGGCAGCAAGGA |
| | | AACGTATTCTCATGCTCAGTAATGCACGAGGCCCTCCATAATCATTACACGCAGAAATCATTA |
| | | AGCTTATCGCCGGGT |
| 1422 | HC Ab78 | GAAGTGCAGCTGCTGGAAAGCGGCGGCGGCGTGGTGCAGCCGGGCCGTAGCCTGCGTCTGAGC |
| | | TGCGCGGCGAGCGGCTTTACCTTTAGCAGCTATGCGatgCATTGGGTGCGTCAGGCGCCGGGC |
| | | AAAGGCCTGGAATGGGTGGCGGTGATTAGCTATGATGGCAGCAACAAATATTATGCGGATAGC |
| | | GTGAAAGGCCGTTTTACCATTAGCCGTGATAACAGCAAAAACACCCTGAGCCTGCAGatgAAC |
| | | AGCCTGCGTGTGGAAGATACCGCGATTTATTATTGCGTGCGTGGCGCGGGCCTGGGCTATCCG |
| | | TATGGCCCGGATGGCTTTGATATTTGGGGCCAGGGCACCatgGTGACCGTGAGCAGCAAGGGA |
| | | CCCTCGGTGTTCCCTCTCGCCCCCTCATCGAGGAGCACGTCCGAATCGACTGCGGCGCTGGGA |
| | | TGTCTCGTGAAGGACTACTTCCCCGAGCCCGTGACCGTGTCATGGAACTCAGGCGCATTGACC |
| | | TCGGGAGTGCACACGTTCCCGGCAGTGTTGCAGTCGTCGGGCCTTTACTCGCTGTCGTCCGTG |
| | | GTCACGGTGCCTTCGTCGAATTTCGGGACGCAGACTTACACATGTAATGTGGATCACAAACCG |
| | | TCCAATACCAAGGTCGATAAGACGGTCGAAAGGAAATGCTGCGTGGAATGTCCTCCCTGCCCA |
| | | GCACCGCCAGTCGCGGGTCCCAGCGTCTTTTTGTTCCCACCGAAGCCCAAGGACACACTGATG |
| | | ATCAGCCGTACGCCGGAGGTAACATGCGTAGTGGTAGATGTCTCGCATGAGGACCCTGAAGTG |
| | | CAGTTCAATTGGTATGTAGACGGCGTGGAGGTGCACAACGCCAAGACCAAGCCACGAGAAGAA |
| | | CAGTTCAACTCGACTTTTAGAGTGGTATCCGTCCTGACCGTCGTGCACCAGGACTGGCTCAAT |
| | | GGAAAGGAGTACAAATGCAAGGTATCCAACAAGGGGTTGCCAGCTCCAATCGAAAAGACCATC |
| | | TCAAAGACAAAGGGGCAGCCCAGAGAGCCCCAAGTGTATACGCTTCCACCCTCAAGGGAGGAG |
| | | ATGACAAAGAATCAGGTATCACTCACATGTTTGGTGAAAGGGTTTTATCCGAGCGATATTGCG |
| | | GTCGAGTGGGAAAGCAACGGTCAACCGGAGAACAACTATAAGACGACTCCCCCTATGCTGGAC |
| | | AGCGACGGGTCGTTCTTTCTGTATTCCAAACTCACGGTGGACAAATCGAGGTGGCAGCAAGGA |
| | | AACGTATTCTCATGCTCAGTAATGCACGAGGCCCTCCATAATCATTACACGCAGAAATCATTA |
| | | AGCTTATCGCCGGGT |
| 1423 | HC Ab79 | GAAGTGCAGCTGCTGGAAAGCGGCGGCGGCGTGGTGCAGCCGGGCCGTAGCCTGCGTCTGAGC |
| | | TGCGCGGCGAGCGGCTTTACCTTTAGCAGCTATGCGatgCATTGGGTGCGTCAGGCGCCGGGC |
| | | AAAGGCCTGGAATGGGTGGCGGTGATTAGCTATGATGGCAGCAACAAATATTATGCGGATAGC |
| | | GTGAAAGGCCGTTTTACCATTAGCCGTGATAACAGCAAAAACACCCTGAGCCTGCAGatgAAC |
| | | AGCCTGCGTGTGGAAGATACCGCGATTTATTATTGCGTGCGTGGCGCGGGCCGTGGCTATCCG |
| | | CATGGCCCGGATGGCTTTGATATTTGGGGCCAGGGCACCatgGTGACCGTGAGCAGCAAGGGA |
| | | CCCTCGGTGTTCCCTCTCGCCCCCTCATCGAGGAGCACGTCCGAATCGACTGCGGCGCTGGGA |
| | | TGTCTCGTGAAGGACTACTTCCCCGAGCCCGTGACCGTGTCATGGAACTCAGGCGCATTGACC |
| | | TCGGGAGTGCACACGTTCCCGGCAGTGTTGCAGTCGTCGGGCCTTTACTCGCTGTCGTCCGTG |
| | | GTCACGGTGCCTTCGTCGAATTTCGGGACGCAGACTTACACATGTAATGTGGATCACAAACCG |
| | | TCCAATACCAAGGTCGATAAGACGGTCGAAAGGAAATGCTGCGTGGAATGTCCTCCCTGCCCA |
| | | GCACCGCCAGTCGCGGGTCCCAGCGTCTTTTTGTTCCCACCGAAGCCCAAGGACACACTGATG |
| | | ATCAGCCGTACGCCGGAGGTAACATGCGTAGTGGTAGATGTCTCGCATGAGGACCCTGAAGTG |
| | | CAGTTCAATTGGTATGTAGACGGCGTGGAGGTGCACAACGCCAAGACCAAGCCACGAGAAGAA |
| | | CAGTTCAACTCGACTTTTAGAGTGGTATCCGTCCTGACCGTCGTGCACCAGGACTGGCTCAAT |
| | | GGAAAGGAGTACAAATGCAAGGTATCCAACAAGGGGTTGCCAGCTCCAATCGAAAAGACCATC |
| | | TCAAAGACAAAGGGGCAGCCCAGAGAGCCCCAAGTGTATACGCTTCCACCCTCAAGGGAGGAG |
| | | ATGACAAAGAATCAGGTATCACTCACATGTTTGGTGAAAGGGTTTTATCCGAGCGATATTGCG |
| | | GTCGAGTGGGAAAGCAACGGTCAACCGGAGAACAACTATAAGACGACTCCCCCTATGCTGGAC |
| | | AGCGACGGGTCGTTCTTTCTGTATTCCAAACTCACGGTGGACAAATCGAGGTGGCAGCAAGGA |
| | | AACGTATTCTCATGCTCAGTAATGCACGAGGCCCTCCATAATCATTACACGCAGAAATCATTA |
| | | AGCTTATCGCCGGGT |
| 1424 | HC Ab80 | GAAGTGCAGCTGCTGGAAAGCGGCGGCGGCGTGGTGCAGCCGGGCCGTAGCCTGCGTCTGAGC |
| | | TGCGCGGCGAGCGGCTTTACCTTTAGCAGCTATGCGatgCATTGGGTGCGTCAGGCGCCGGGC |
| | | AAAGGCCTGGAATGGGTGGCGGTGATTAGCTATGATGGCAGCAACAAATATTATGCGGATAGC |
| | | GTGAAAGGCCGTTTTACCATTAGCCGTGATAACAGCAAAAACACCCTGAGCCTGCAGatgAAC |
| | | AGCCTGCGTGTGGAAGATACCGCGATTTATTATTGCGTGCGTGGCGCGGGCATTGGCTATCCG |
| | | CATGGCCCGGATGGCTTTGATATTTGGGGCCAGGGCACCatgGTGACCGTGAGCAGCAAGGGA |
| | | CCCTCGGTGTTCCCTCTCGCCCCCTCATCGAGGAGCACGTCCGAATCGACTGCGGCGCTGGGA |
| | | TGTCTCGTGAAGGACTACTTCCCCGAGCCCGTGACCGTGTCATGGAACTCAGGCGCATTGACC |
| | | TCGGGAGTGCACACGTTCCCGGCAGTGTTGCAGTCGTCGGGCCTTTACTCGCTGTCGTCCGTG |
| | | GTCACGGTGCCTTCGTCGAATTTCGGGACGCAGACTTACACATGTAATGTGGATCACAAACCG |
| | | TCCAATACCAAGGTCGATAAGACGGTCGAAAGGAAATGCTGCGTGGAATGTCCTCCCTGCCCA |
| | | GCACCGCCAGTCGCGGGTCCCAGCGTCTTTTTGTTCCCACCGAAGCCCAAGGACACACTGATG |
| | | ATCAGCCGTACGCCGGAGGTAACATGCGTAGTGGTAGATGTCTCGCATGAGGACCCTGAAGTG |
| | | CAGTTCAATTGGTATGTAGACGGCGTGGAGGTGCACAACGCCAAGACCAAGCCACGAGAAGAA |
| | | CAGTTCAACTCGACTTTTAGAGTGGTATCCGTCCTGACCGTCGTGCACCAGGACTGGCTCAAT |
| | | GGAAAGGAGTACAAATGCAAGGTATCCAACAAGGGGTTGCCAGCTCCAATCGAAAAGACCATC |
| | | TCAAAGACAAAGGGGCAGCCCAGAGAGCCCCAAGTGTATACGCTTCCACCCTCAAGGGAGGAG |
| | | ATGACAAAGAATCAGGTATCACTCACATGTTTGGTGAAAGGGTTTTATCCGAGCGATATTGCG |
| | | GTCGAGTGGGAAAGCAACGGTCAACCGGAGAACAACTATAAGACGACTCCCCCTATGCTGGAC |
| | | AGCGACGGGTCGTTCTTTCTGTATTCCAAACTCACGGTGGACAAATCGAGGTGGCAGCAAGGA |
| | | AACGTATTCTCATGCTCAGTAATGCACGAGGCCCTCCATAATCATTACACGCAGAAATCATTA |
| | | AGCTTATCGCCGGGT |
| 1425 | HC Ab81 | GAAGTGCAGCTGCTGGAAAGCGGCGGCGGCGTGGTGCAGCCGGGCCGTAGCCTGCGTCTGAGC |
| | | TGCGCGGCGAGCGGCTTTACCTTTAGCAGCTATGCGatgCATTGGGTGCGTCAGGCGCCGGGC |
| | | AAAGGCCTGGAATGGGTGGCGGTGATTAGCTATGATGGCAGCAACAAATATTATGCGGATAGC |
| | | GTGAAAGGCCGTTTTACCATTAGCCGTGATAACAGCAAAAACACCCTGAGCCTGCAGatgAAC |
| | | AGCCTGCGTGTGGAAGATACCGCGATTTATTATTGCGTGCGTGGCGCGGGCCGTGGCTATCCG |
| | | TATGGCCCGGATGGCTTTGATATTTGGGGCCAGGGCACCatgGTGACCGTGAGCAGCAAGGGA |
| | | CCCTCGGTGTTCCCTCTCGCCCCCTCATCGAGGAGCACGTCCGAATCGACTGCGGCGCTGGGA |
| | | TGTCTCGTGAAGGACTACTTCCCCGAGCCCGTGACCGTGTCATGGAACTCAGGCGCATTGACC |
| | | TCGGGAGTGCACACGTTCCCGGCAGTGTTGCAGTCGTCGGGCCTTTACTCGCTGTCGTCCGTG |
| | | GTCACGGTGCCTTCGTCGAATTTCGGGACGCAGACTTACACATGTAATGTGGATCACAAACCG |
| | | TCCAATACCAAGGTCGATAAGACGGTCGAAAGGAAATGCTGCGTGGAATGTCCTCCCTGCCCA |
| | | GCACCGCCAGTCGCGGGTCCCAGCGTCTTTTTGTTCCCACCGAAGCCCAAGGACACACTGATG |
| | | ATCAGCCGTACGCCGGAGGTAACATGCGTAGTGGTAGATGTCTCGCATGAGGACCCTGAAGTG |
| | | CAGTTCAATTGGTATGTAGACGGCGTGGAGGTGCACAACGCCAAGACCAAGCCACGAGAAGAA |
| | | CAGTTCAACTCGACTTTTAGAGTGGTATCCGTCCTGACCGTCGTGCACCAGGACTGGCTCAAT |
| | | GGAAAGGAGTACAAATGCAAGGTATCCAACAAGGGGTTGCCAGCTCCAATCGAAAAGACCATC |
| | | TCAAAGACAAAGGGGCAGCCCAGAGAGCCCCAAGTGTATACGCTTCCACCCTCAAGGGAGGAG |
| | | ATGACAAAGAATCAGGTATCACTCACATGTTTGGTGAAAGGGTTTTATCCGAGCGATATTGCG |
| | | GTCGAGTGGGAAAGCAACGGTCAACCGGAGAACAACTATAAGACGACTCCCCCTATGCTGGAC |
| | | AGCGACGGGTCGTTCTTTCTGTATTCCAAACTCACGGTGGACAAATCGAGGTGGCAGCAAGGA |
| | | AACGTATTCTCATGCTCAGTAATGCACGAGGCCCTCCATAATCATTACACGCAGAAATCATTA |
| | | AGCTTATCGCCGGGT |
| 1426 | HC Ab82 | GAAGTGCAGCTGCTGGAAAGCGGCGGCGGCGTGGTGCAGCCGGGCCGTAGCCTGCGTCTGAGC |
| | | TGCGCGGCGAGCGGCTTTACCTTTAGCAGCTATGCGatgCATTGGGTGCGTCAGGCGCCGGGC |
| | | AAAGGCCTGGAATGGGTGGCGGTGATTAGCTATGATGGCAGCAACAAATATTATGCGGATAGC |
| | | GTGAAAGGCCGTTTTACCATTAGCCGTGATAACAGCAAAAACACCCTGAGCCTGCAGatgAAC |
| | | AGCCTGCGTGTGGAAGATACCGCGATTTATTATTGCGTGCGTGGCGCGGGCCTGGGCTTTCCG |
| | | TTTGGCCCGGATGGCTTTGATATTTGGGGCCAGGGCACCatgGTGACCGTGAGCAGCAAGGGA |
| | | CCCTCGGTGTTCCCTCTCGCCCCCTCATCGAGGAGCACGTCCGAATCGACTGCGGCGCTGGGA |
| | | TGTCTCGTGAAGGACTACTTCCCCGAGCCCGTGACCGTGTCATGGAACTCAGGCGCATTGACC |
| | | TCGGGAGTGCACACGTTCCCGGCAGTGTTGCAGTCGTCGGGCCTTTACTCGCTGTCGTCCGTG |
| | | GTCACGGTGCCTTCGTCGAATTTCGGGACGCAGACTTACACATGTAATGTGGATCACAAACCG |
| | | TCCAATACCAAGGTCGATAAGACGGTCGAAAGGAAATGCTGCGTGGAATGTCCTCCCTGCCCA |
| | | GCACCGCCAGTCGCGGGTCCCAGCGTCTTTTTGTTCCCACCGAAGCCCAAGGACACACTGATG |
| | | ATCAGCCGTACGCCGGAGGTAACATGCGTAGTGGTAGATGTCTCGCATGAGGACCCTGAAGTG |
| | | CAGTTCAATTGGTATGTAGACGGCGTGGAGGTGCACAACGCCAAGACCAAGCCACGAGAAGAA |
| | | CAGTTCAACTCGACTTTTAGAGTGGTATCCGTCCTGACCGTCGTGCACCAGGACTGGCTCAAT |
| | | GGAAAGGAGTACAAATGCAAGGTATCCAACAAGGGGTTGCCAGCTCCAATCGAAAAGACCATC |
| | | TCAAAGACAAAGGGGCAGCCCAGAGAGCCCCAAGTGTATACGCTTCCACCCTCAAGGGAGGAG |
| | | ATGACAAAGAATCAGGTATCACTCACATGTTTGGTGAAAGGGTTTTATCCGAGCGATATTGCG |
| | | GTCGAGTGGGAAAGCAACGGTCAACCGGAGAACAACTATAAGACGACTCCCCCTATGCTGGAC |
| | | AGCGACGGGTCGTTCTTTCTGTATTCCAAACTCACGGTGGACAAATCGAGGTGGCAGCAAGGA |
| | | AACGTATTCTCATGCTCAGTAATGCACGAGGCCCTCCATAATCATTACACGCAGAAATCATTA |
| | | AGCTTATCGCCGGGT |
| 1427 | HC Ab83 | GAAGTGCAGCTGCTGGAAAGCGGCGGCGGCGTGGTGCAGCCGGGCCGTAGCCTGCGTCTGAGC |
| | | TGCGCGGCGAGCGGCTTTACCTTTAGCAGCTATGCGatgCATTGGGTGCGTCAGGCGCCGGGC |
| | | AAAGGCCTGGAATGGGTGGCGGTGATTAGCTATGATGGCAGCAACAAATATTATGCGGATAGC |
| | | GTGAAAGGCCGTTTTACCATTAGCCGTGATAACAGCAAAAACACCCTGAGCCTGCAGatgAAC |
| | | AGCCTGCGTGTGGAAGATACCGCGATTTATTATTGCGTGCGTGGCGCGGGCCGTGGCTTTCCG |
| | | TATGGCCCGGATGGCTTTGATATTTGGGGCCAGGGCACCatgGTGACCGTGAGCAGCAAGGGA |
| | | CCCTCGGTGTTCCCTCTCGCCCCCTCATCGAGGAGCACGTCCGAATCGACTGCGGCGCTGGGA |
| | | TGTCTCGTGAAGGACTACTTCCCCGAGCCCGTGACCGTGTCATGGAACTCAGGCGCATTGACC |
| | | TCGGGAGTGCACACGTTCCCGGCAGTGTTGCAGTCGTCGGGCCTTTACTCGCTGTCGTCCGTG |
| | | GTCACGGTGCCTTCGTCGAATTTCGGGACGCAGACTTACACATGTAATGTGGATCACAAACCG |
| | | TCCAATACCAAGGTCGATAAGACGGTCGAAAGGAAATGCTGCGTGGAATGTCCTCCCTGCCCA |
| | | GCACCGCCAGTCGCGGGTCCCAGCGTCTTTTTGTTCCCACCGAAGCCCAAGGACACACTGATG |
| | | ATCAGCCGTACGCCGGAGGTAACATGCGTAGTGGTAGATGTCTCGCATGAGGACCCTGAAGTG |
| | | CAGTTCAATTGGTATGTAGACGGCGTGGAGGTGCACAACGCCAAGACCAAGCCACGAGAAGAA |
| | | CAGTTCAACTCGACTTTTAGAGTGGTATCCGTCCTGACCGTCGTGCACCAGGACTGGCTCAAT |
| | | GGAAAGGAGTACAAATGCAAGGTATCCAACAAGGGGTTGCCAGCTCCAATCGAAAAGACCATC |
| | | TCAAAGACAAAGGGGCAGCCCAGAGAGCCCCAAGTGTATACGCTTCCACCCTCAAGGGAGGAG |
| | | ATGACAAAGAATCAGGTATCACTCACATGTTTGGTGAAAGGGTTTTATCCGAGCGATATTGCG |
| | | GTCGAGTGGGAAAGCAACGGTCAACCGGAGAACAACTATAAGACGACTCCCCCTATGCTGGAC |
| | | AGCGACGGGTCGTTCTTTCTGTATTCCAAACTCACGGTGGACAAATCGAGGTGGCAGCAAGGA |
| | | AACGTATTCTCATGCTCAGTAATGCACGAGGCCCTCCATAATCATTACACGCAGAAATCATTA |
| | | AGCTTATCGCCGGGT |
| 1428 | HC Ab84 | GAAGTGCAGCTGCTGGAAAGCGGCGGCGGCGTGGTGCAGCCGGGCCGTAGCCTGCGTCTGAGC |
| | | TGCGCGGCGAGCGGCTTTACCTTTAGCAGCTATGCGatgCATTGGGTGCGTCAGGCGCCGGGC |
| | | AAAGGCCTGGAATGGGTGGCGGTGATTAGCTATGATGGCAGCAACAAATATTATGCGGATAGC |
| | | GTGAAAGGCCGTTTTACCATTAGCCGTGATAACAGCAAAAACACCCTGAGCCTGCAGatgAAC |
| | | AGCCTGCGTGTGGAAGATACCGCGATTTATTATTGCGTGCGTGGCGCGGGCCTGGGCTATCCG |
| | | AACGGCCCGGATGGCTTTGATATTTGGGGCCAGGGCACCatgGTGACCGTGAGCAGCAAGGGA |
| | | CCCTCGGTGTTCCCTCTCGCCCCCTCATCGAGGAGCACGTCCGAATCGACTGCGGCGCTGGGA |
| | | TGTCTCGTGAAGGACTACTTCCCCGAGCCCGTGACCGTGTCATGGAACTCAGGCGCATTGACC |
| | | TCGGGAGTGCACACGTTCCCGGCAGTGTTGCAGTCGTCGGGCCTTTACTCGCTGTCGTCCGTG |
| | | GTCACGGTGCCTTCGTCGAATTTCGGGACGCAGACTTACACATGTAATGTGGATCACAAACCG |
| | | TCCAATACCAAGGTCGATAAGACGGTCGAAAGGAAATGCTGCGTGGAATGTCCTCCCTGCCCA |
| | | GCACCGCCAGTCGCGGGTCCCAGCGTCTTTTTGTTCCCACCGAAGCCCAAGGACACACTGATG |
| | | ATCAGCCGTACGCCGGAGGTAACATGCGTAGTGGTAGATGTCTCGCATGAGGACCCTGAAGTG |
| | | CAGTTCAATTGGTATGTAGACGGCGTGGAGGTGCACAACGCCAAGACCAAGCCACGAGAAGAA |
| | | CAGTTCAACTCGACTTTTAGAGTGGTATCCGTCCTGACCGTCGTGCACCAGGACTGGCTCAAT |
| | | GGAAAGGAGTACAAATGCAAGGTATCCAACAAGGGGTTGCCAGCTCCAATCGAAAAGACCATC |
| | | TCAAAGACAAAGGGGCAGCCCAGAGAGCCCCAAGTGTATACGCTTCCACCCTCAAGGGAGGAG |
| | | ATGACAAAGAATCAGGTATCACTCACATGTTTGGTGAAAGGGTTTTATCCGAGCGATATTGCG |
| | | GTCGAGTGGGAAAGCAACGGTCAACCGGAGAACAACTATAAGACGACTCCCCCTATGCTGGAC |
| | | AGCGACGGGTCGTTCTTTCTGTATTCCAAACTCACGGTGGACAAATCGAGGTGGCAGCAAGGA |
| | | AACGTATTCTCATGCTCAGTAATGCACGAGGCCCTCCATAATCATTACACGCAGAAATCATTA |
| | | AGCTTATCGCCGGGT |
| 1429 | HC Ab85 | GAAGTGCAGCTGCTGGAAAGCGGCGGCGGCGTGGTGCAGCCGGGCCGTAGCCTGCGTCTGAGC |
| | | TGCGCGGCGAGCGGCTTTACCTTTAGCAGCTATGCGatgCATTGGGTGCGTCAGGCGCCGGGC |
| | | AAAGGCCTGGAATGGGTGGCGGTGATTAGCTATGATGGCAGCAACAAATATTATGCGGATAGC |
| | | GTGAAAGGCCGTTTTACCATTAGCCGTGATAACAGCAAAAACACCCTGAGCCTGCAGatgAAC |
| | | AGCCTGCGTGTGGAAGATACCGCGATTTATTATTGCGTGCGTGGCGCGGGCCAGGGCTTTCCG |
| | | TATGGCCCGGATGGCTTTGATATTTGGGGCCAGGGCACCatgGTGACCGTGAGCAGCAAGGGA |
| | | CCCTCGGTGTTCCCTCTCGCCCCCTCATCGAGGAGCACGTCCGAATCGACTGCGGCGCTGGGA |
| | | TGTCTCGTGAAGGACTACTTCCCCGAGCCCGTGACCGTGTCATGGAACTCAGGCGCATTGACC |
| | | TCGGGAGTGCACACGTTCCCGGCAGTGTTGCAGTCGTCGGGCCTTTACTCGCTGTCGTCCGTG |
| | | GTCACGGTGCCTTCGTCGAATTTCGGGACGCAGACTTACACATGTAATGTGGATCACAAACCG |
| | | TCCAATACCAAGGTCGATAAGACGGTCGAAAGGAAATGCTGCGTGGAATGTCCTCCCTGCCCA |
| | | GCACCGCCAGTCGCGGGTCCCAGCGTCTTTTTGTTCCCACCGAAGCCCAAGGACACACTGATG |
| | | ATCAGCCGTACGCCGGAGGTAACATGCGTAGTGGTAGATGTCTCGCATGAGGACCCTGAAGTG |
| | | CAGTTCAATTGGTATGTAGACGGCGTGGAGGTGCACAACGCCAAGACCAAGCCACGAGAAGAA |
| | | CAGTTCAACTCGACTTTTAGAGTGGTATCCGTCCTGACCGTCGTGCACCAGGACTGGCTCAAT |
| | | GGAAAGGAGTACAAATGCAAGGTATCCAACAAGGGGTTGCCAGCTCCAATCGAAAAGACCATC |
| | | TCAAAGACAAAGGGGCAGCCCAGAGAGCCCCAAGTGTATACGCTTCCACCCTCAAGGGAGGAG |
| | | ATGACAAAGAATCAGGTATCACTCACATGTTTGGTGAAAGGGTTTTATCCGAGCGATATTGCG |
| | | GTCGAGTGGGAAAGCAACGGTCAACCGGAGAACAACTATAAGACGACTCCCCCTATGCTGGAC |
| | | AGCGACGGGTCGTTCTTTCTGTATTCCAAACTCACGGTGGACAAATCGAGGTGGCAGCAAGGA |
| | | AACGTATTCTCATGCTCAGTAATGCACGAGGCCCTCCATAATCATTACACGCAGAAATCATTA |
| | | AGCTTATCGCCGGGT |
| 1430 | HC Ab86 | GAAGTGCAGCTGCTGGAAAGCGGCGGCGGCGTGGTGCAGCCGGGCCGTAGCCTGCGTCTGAGC |
| | | TGCGCGGCGAGCGGCTTTACCTTTAGCAGCTATGCGatgCATTGGGTGCGTCAGGCGCCGGGC |
| | | AAAGGCCTGGAATGGGTGGCGGTGATTAGCTATGATGGCAGCAACAAATATTATGCGGATAGC |
| | | GTGAAAGGCCGTTTTACCATTAGCCGTGATAACAGCAAAAACACCCTGAGCCTGCAGatgAAC |
| | | AGCCTGCGTGTGGAAGATACCGCGATTTATTATTGCGTGCGTGGCGCGGGCCGTGGCCTGACC |
| | | TATGGCCCGGATGGCTTTGATATTTGGGGCCAGGGCACCatgGTGACCGTGAGCAGCAAGGGA |
| | | CCCTCGGTGTTCCCTCTCGCCCCCTCATCGAGGAGCACGTCCGAATCGACTGCGGCGCTGGGA |
| | | TGTCTCGTGAAGGACTACTTCCCCGAGCCCGTGACCGTGTCATGGAACTCAGGCGCATTGACC |
| | | TCGGGAGTGCACACGTTCCCGGCAGTGTTGCAGTCGTCGGGCCTTTACTCGCTGTCGTCCGTG |
| | | GTCACGGTGCCTTCGTCGAATTTCGGGACGCAGACTTACACATGTAATGTGGATCACAAACCG |
| | | TCCAATACCAAGGTCGATAAGACGGTCGAAAGGAAATGCTGCGTGGAATGTCCTCCCTGCCCA |
| | | GCACCGCCAGTCGCGGGTCCCAGCGTCTTTTTGTTCCCACCGAAGCCCAAGGACACACTGATG |
| | | ATCAGCCGTACGCCGGAGGTAACATGCGTAGTGGTAGATGTCTCGCATGAGGACCCTGAAGTG |
| | | CAGTTCAATTGGTATGTAGACGGCGTGGAGGTGCACAACGCCAAGACCAAGCCACGAGAAGAA |
| | | CAGTTCAACTCGACTTTTAGAGTGGTATCCGTCCTGACCGTCGTGCACCAGGACTGGCTCAAT |
| | | GGAAAGGAGTACAAATGCAAGGTATCCAACAAGGGGTTGCCAGCTCCAATCGAAAAGACCATC |
| | | TCAAAGACAAAGGGGCAGCCCAGAGAGCCCCAAGTGTATACGCTTCCACCCTCAAGGGAGGAG |
| | | ATGACAAAGAATCAGGTATCACTCACATGTTTGGTGAAAGGGTTTTATCCGAGCGATATTGCG |
| | | GTCGAGTGGGAAAGCAACGGTCAACCGGAGAACAACTATAAGACGACTCCCCCTATGCTGGAC |
| | | AGCGACGGGTCGTTCTTTCTGTATTCCAAACTCACGGTGGACAAATCGAGGTGGCAGCAAGGA |
| | | AACGTATTCTCATGCTCAGTAATGCACGAGGCCCTCCATAATCATTACACGCAGAAATCATTA |
| | | AGCTTATCGCCGGGT |
| 1431 | HC Ab87 | GAAGTGCAGCTGCTGGAAAGCGGCGGCGGCGTGGTGCAGCCGGGCCGTAGCCTGCGTCTGAGC |
| | | TGCGCGGCGAGCGGCTTTACCTTTAGCAGCTATGCGatgCATTGGGTGCGTCAGGCGCCGGGC |
| | | AAAGGCCTGGAATGGGTGGCGGTGATTAGCTATGATGGCAGCAACAAATATTATGCGGATAGC |
| | | GTGAAAGGCCGTTTTACCATTAGCCGTGATAACAGCAAAAACACCCTGAGCCTGCAGatgAAC |
| | | AGCCTGCGTGTGGAAGATACCGCGATTTATTATTGCGTGCGTGGCGCGGGCCGTGGCTTTACC |
| | | TGGGGCCCGGATGGCTTTGATATTTGGGGCCAGGGCACCatgGTGACCGTGAGCAGCAAGGGA |
| | | CCCTCGGTGTTCCCTCTCGCCCCCTCATCGAGGAGCACGTCCGAATCGACTGCGGCGCTGGGA |
| | | TGTCTCGTGAAGGACTACTTCCCCGAGCCCGTGACCGTGTCATGGAACTCAGGCGCATTGACC |
| | | TCGGGAGTGCACACGTTCCCGGCAGTGTTGCAGTCGTCGGGCCTTTACTCGCTGTCGTCCGTG |
| | | GTCACGGTGCCTTCGTCGAATTTCGGGACGCAGACTTACACATGTAATGTGGATCACAAACCG |
| | | TCCAATACCAAGGTCGATAAGACGGTCGAAAGGAAATGCTGCGTGGAATGTCCTCCCTGCCCA |
| | | GCACCGCCAGTCGCGGGTCCCAGCGTCTTTTTGTTCCCACCGAAGCCCAAGGACACACTGATG |
| | | ATCAGCCGTACGCCGGAGGTAACATGCGTAGTGGTAGATGTCTCGCATGAGGACCCTGAAGTG |
| | | CAGTTCAATTGGTATGTAGACGGCGTGGAGGTGCACAACGCCAAGACCAAGCCACGAGAAGAA |
| | | CAGTTCAACTCGACTTTTAGAGTGGTATCCGTCCTGACCGTCGTGCACCAGGACTGGCTCAAT |
| | | GGAAAGGAGTACAAATGCAAGGTATCCAACAAGGGGTTGCCAGCTCCAATCGAAAAGACCATC |
| | | TCAAAGACAAAGGGGCAGCCCAGAGAGCCCCAAGTGTATACGCTTCCACCCTCAAGGGAGGAG |
| | | ATGACAAAGAATCAGGTATCACTCACATGTTTGGTGAAAGGGTTTTATCCGAGCGATATTGCG |
| | | GTCGAGTGGGAAAGCAACGGTCAACCGGAGAACAACTATAAGACGACTCCCCCTATGCTGGAC |
| | | AGCGACGGGTCGTTCTTTCTGTATTCCAAACTCACGGTGGACAAATCGAGGTGGCAGCAAGGA |
| | | AACGTATTCTCATGCTCAGTAATGCACGAGGCCCTCCATAATCATTACACGCAGAAATCATTA |
| | | AGCTTATCGCCGGGT |
| 1432 | HC Ab88 | GAAGTGCAGCTGCTGGAAAGCGGCGGCGGCGTGGTGCAGCCGGGCCGTAGCCTGCGTCTGAGC |
| | | TGCGCGGCGAGCGGCTTTACCTTTAGCAGCTATGCGatgCATTGGGTGCGTCAGGCGCCGGGC |
| | | AAAGGCCTGGAATGGGTGGCGGTGATTAGCTATGATGGCAGCAACAAATATTATGCGGATAGC |
| | | GTGAAAGGCCGTTTTACCATTAGCCGTGATAACAGCAAAAACACCCTGAGCCTGCAGatgAAC |
| | | AGCCTGCGTGTGGAAGATACCGCGATTTATTATTGCGTGCGTGGCGCGGGCCGTGGCCTGACC |
| | | TATGGCCCGGATGGCTTTGATATTTGGGGCCAGGGCACCatgGTGACCGTGAGCAGCAAGGGA |
| | | CCCTCGGTGTTCCCTCTCGCCCCCTCATCGAGGAGCACGTCCGAATCGACTGCGGCGCTGGGA |
| | | TGTCTCGTGAAGGACTACTTCCCCGAGCCCGTGACCGTGTCATGGAACTCAGGCGCATTGACC |
| | | TCGGGAGTGCACACGTTCCCGGCAGTGTTGCAGTCGTCGGGCCTTTACTCGCTGTCGTCCGTG |
| | | GTCACGGTGCCTTCGTCGAATTTCGGGACGCAGACTTACACATGTAATGTGGATCACAAACCG |
| | | TCCAATACCAAGGTCGATAAGACGGTCGAAAGGAAATGCTGCGTGGAATGTCCTCCCTGCCCA |
| | | GCACCGCCAGTCGCGGGTCCCAGCGTCTTTTTGTTCCCACCGAAGCCCAAGGACACACTGATG |
| | | ATCAGCCGTACGCCGGAGGTAACATGCGTAGTGGTAGATGTCTCGCATGAGGACCCTGAAGTG |
| | | CAGTTCAATTGGTATGTAGACGGCGTGGAGGTGCACAACGCCAAGACCAAGCCACGAGAAGAA |
| | | CAGTTCAACTCGACTTTTAGAGTGGTATCCGTCCTGACCGTCGTGCACCAGGACTGGCTCAAT |
| | | GGAAAGGAGTACAAATGCAAGGTATCCAACAAGGGGTTGCCAGCTCCAATCGAAAAGACCATC |
| | | TCAAAGACAAAGGGGCAGCCCAGAGAGCCCCAAGTGTATACGCTTCCACCCTCAAGGGAGGAG |
| | | ATGACAAAGAATCAGGTATCACTCACATGTTTGGTGAAAGGGTTTTATCCGAGCGATATTGCG |
| | | GTCGAGTGGGAAAGCAACGGTCAACCGGAGAACAACTATAAGACGACTCCCCCTATGCTGGAC |
| | | AGCGACGGGTCGTTCTTTCTGTATTCCAAACTCACGGTGGACAAATCGAGGTGGCAGCAAGGA |
| | | AACGTATTCTCATGCTCAGTAATGCACGAGGCCCTCCATAATCATTACACGCAGAAATCATTA |
| | | AGCTTATCGCCGGGT |
| 1433 | HC Ab89 | GAAGTGCAGCTGCTGGAAAGCGGCGGCGGCGTGGTGCAGCCGGGCCGTAGCCTGCGTCTGAGC |
| | | TGCGCGGCGAGCGGCTTTACCTTTAGCAGCTATGCGatgCATTGGGTGCGTCAGGCGCCGGGC |
| | | AAAGGCCTGGAATGGGTGGCGGTGATTAGCTATGATGGCAGCAACAAATATTATGCGGATAGC |
| | | GTGAAAGGCCGTTTTACCATTAGCCGTGATAACAGCAAAAACACCCTGAGCCTGCAGatgAAC |
| | | AGCCTGCGTGTGGAAGATACCGCGATTTATTATTGCGTGCGTGGCGCGGGCCGTGGCTTTCCG |
| | | TATGGCCCGGATGGCTTTGATATTTGGGGCCAGGGCACCatgGTGACCGTGAGCAGCAAGGGA |
| | | CCCTCGGTGTTCCCTCTCGCCCCCTCATCGAGGAGCACGTCCGAATCGACTGCGGCGCTGGGA |
| | | TGTCTCGTGAAGGACTACTTCCCCGAGCCCGTGACCGTGTCATGGAACTCAGGCGCATTGACC |
| | | TCGGGAGTGCACACGTTCCCGGCAGTGTTGCAGTCGTCGGGCCTTTACTCGCTGTCGTCCGTG |
| | | GTCACGGTGCCTTCGTCGAATTTCGGGACGCAGACTTACACATGTAATGTGGATCACAAACCG |
| | | TCCAATACCAAGGTCGATAAGACGGTCGAAAGGAAATGCTGCGTGGAATGTCCTCCCTGCCCA |
| | | GCACCGCCAGTCGCGGGTCCCAGCGTCTTTTTGTTCCCACCGAAGCCCAAGGACACACTGATG |
| | | ATCAGCCGTACGCCGGAGGTAACATGCGTAGTGGTAGATGTCTCGCATGAGGACCCTGAAGTG |
| | | CAGTTCAATTGGTATGTAGACGGCGTGGAGGTGCACAACGCCAAGACCAAGCCACGAGAAGAA |
| | | CAGTTCAACTCGACTTTTAGAGTGGTATCCGTCCTGACCGTCGTGCACCAGGACTGGCTCAAT |
| | | GGAAAGGAGTACAAATGCAAGGTATCCAACAAGGGGTTGCCAGCTCCAATCGAAAAGACCATC |
| | | TCAAAGACAAAGGGGCAGCCCAGAGAGCCCCAAGTGTATACGCTTCCACCCTCAAGGGAGGAG |
| | | ATGACAAAGAATCAGGTATCACTCACATGTTTGGTGAAAGGGTTTTATCCGAGCGATATTGCG |
| | | GTCGAGTGGGAAAGCAACGGTCAACCGGAGAACAACTATAAGACGACTCCCCCTATGCTGGAC |
| | | AGCGACGGGTCGTTCTTTCTGTATTCCAAACTCACGGTGGACAAATCGAGGTGGCAGCAAGGA |
| | | AACGTATTCTCATGCTCAGTAATGCACGAGGCCCTCCATAATCATTACACGCAGAAATCATTA |
| | | AGCTTATCGCCGGGT |
| 1434 | HC Ab90 | GAAGTGCAGCTGCTGGAAAGCGGCGGCGGCGTGGTGCAGCCGGGCCGTAGCCTGCGTCTGAGC |
| | | TGCGCGGCGAGCGGCTTTACCTTTAGCAGCTATGCGatgCATTGGGTGCGTCAGGCGCCGGGC |
| | | AAAGGCCTGGAATGGGTGGCGGTGATTAGCTATGATGGCAGCAACAAATATTATGCGGATAGC |
| | | GTGAAAGGCCGTTTTACCATTAGCCGTGATAACAGCAAAAACACCCTGAGCCTGCAGatgAAC |
| | | AGCCTGCGTGTGGAAGATACCGCGATTTATTATTGCGTGCGTGGCGCGGGCCGTGGCTATCCG |
| | | TATGGCCCGGATGGCTTTGATATTTGGGGCCAGGGCACCatgGTGACCGTGAGCAGCAAGGGA |
| | | CCCTCGGTGTTCCCTCTCGCCCCCTCATCGAGGAGCACGTCCGAATCGACTGCGGCGCTGGGA |
| | | TGTCTCGTGAAGGACTACTTCCCCGAGCCCGTGACCGTGTCATGGAACTCAGGCGCATTGACC |
| | | TCGGGAGTGCACACGTTCCCGGCAGTGTTGCAGTCGTCGGGCCTTTACTCGCTGTCGTCCGTG |
| | | GTCACGGTGCCTTCGTCGAATTTCGGGACGCAGACTTACACATGTAATGTGGATCACAAACCG |
| | | TCCAATACCAAGGTCGATAAGACGGTCGAAAGGAAATGCTGCGTGGAATGTCCTCCCTGCCCA |
| | | GCACCGCCAGTCGCGGGTCCCAGCGTCTTTTTGTTCCCACCGAAGCCCAAGGACACACTGATG |
| | | ATCAGCCGTACGCCGGAGGTAACATGCGTAGTGGTAGATGTCTCGCATGAGGACCCTGAAGTG |
| | | CAGTTCAATTGGTATGTAGACGGCGTGGAGGTGCACAACGCCAAGACCAAGCCACGAGAAGAA |
| | | CAGTTCAACTCGACTTTTAGAGTGGTATCCGTCCTGACCGTCGTGCACCAGGACTGGCTCAAT |
| | | GGAAAGGAGTACAAATGCAAGGTATCCAACAAGGGGTTGCCAGCTCCAATCGAAAAGACCATC |
| | | TCAAAGACAAAGGGGCAGCCCAGAGAGCCCCAAGTGTATACGCTTCCACCCTCAAGGGAGGAG |
| | | ATGACAAAGAATCAGGTATCACTCACATGTTTGGTGAAAGGGTTTTATCCGAGCGATATTGCG |
| | | GTCGAGTGGGAAAGCAACGGTCAACCGGAGAACAACTATAAGACGACTCCCCCTATGCTGGAC |
| | | AGCGACGGGTCGTTCTTTCTGTATTCCAAACTCACGGTGGACAAATCGAGGTGGCAGCAAGGA |
| | | AACGTATTCTCATGCTCAGTAATGCACGAGGCCCTCCATAATCATTACACGCAGAAATCATTA |
| | | AGCTTATCGCCGGGT |
| 1435 | HC Ab91 | GAAGTGCAGCTGCTGGAAAGCGGCGGCGGCGTGGTGCAGCCGGGCCGTAGCCTGCGTCTGAGC |
| | | TGCGCGGCGAGCGGCTTTACCTTTAGCAGCTATGCGatgCATTGGGTGCGTCAGGCGCCGGGC |
| | | AAAGGCCTGGAATGGGTGGCGGTGATTAGCTATGATGGCAGCAACAAATATTATGCGGATAGC |
| | | GTGAAAGGCCGTTTTACCATTAGCCGTGATAACAGCAAAAACACCCTGAGCCTGCAGatgAAC |
| | | AGCCTGCGTGTGGAAGATACCGCGATTTATTATTGCGTGCGTGGCGCGGGCCAGGGCTATatg |
| | | CATGGCCCGGATGGCTTTGATATTTGGGGCCAGGGCACCatgGTGACCGTGAGCAGCAAGGGA |
| | | CCCTCGGTGTTCCCTCTCGCCCCCTCATCGAGGAGCACGTCCGAATCGACTGCGGCGCTGGGA |
| | | TGTCTCGTGAAGGACTACTTCCCCGAGCCCGTGACCGTGTCATGGAACTCAGGCGCATTGACC |
| | | TCGGGAGTGCACACGTTCCCGGCAGTGTTGCAGTCGTCGGGCCTTTACTCGCTGTCGTCCGTG |
| | | GTCACGGTGCCTTCGTCGAATTTCGGGACGCAGACTTACACATGTAATGTGGATCACAAACCG |
| | | TCCAATACCAAGGTCGATAAGACGGTCGAAAGGAAATGCTGCGTGGAATGTCCTCCCTGCCCA |
| | | GCACCGCCAGTCGCGGGTCCCAGCGTCTTTTTGTTCCCACCGAAGCCCAAGGACACACTGATG |
| | | ATCAGCCGTACGCCGGAGGTAACATGCGTAGTGGTAGATGTCTCGCATGAGGACCCTGAAGTG |
| | | CAGTTCAATTGGTATGTAGACGGCGTGGAGGTGCACAACGCCAAGACCAAGCCACGAGAAGAA |
| | | CAGTTCAACTCGACTTTTAGAGTGGTATCCGTCCTGACCGTCGTGCACCAGGACTGGCTCAAT |
| | | GGAAAGGAGTACAAATGCAAGGTATCCAACAAGGGGTTGCCAGCTCCAATCGAAAAGACCATC |
| | | TCAAAGACAAAGGGGCAGCCCAGAGAGCCCCAAGTGTATACGCTTCCACCCTCAAGGGAGGAG |
| | | ATGACAAAGAATCAGGTATCACTCACATGTTTGGTGAAAGGGTTTTATCCGAGCGATATTGCG |
| | | GTCGAGTGGGAAAGCAACGGTCAACCGGAGAACAACTATAAGACGACTCCCCCTATGCTGGAC |
| | | AGCGACGGGTCGTTCTTTCTGTATTCCAAACTCACGGTGGACAAATCGAGGTGGCAGCAAGGA |
| | | AACGTATTCTCATGCTCAGTAATGCACGAGGCCCTCCATAATCATTACACGCAGAAATCATTA |
| | | AGCTTATCGCCGGGT |
| 1436 | HC Ab92 | GAAGTGCAGCTGCTGGAAAGCGGCGGCGGCGTGGTGCAGCCGGGCCGTAGCCTGCGTCTGAGC |
| | | TGCGCGGCGAGCGGCTTTACCTTTAGCAGCTATGCGatgCATTGGGTGCGTCAGGCGCCGGGC |
| | | AAAGGCCTGGAATGGGTGGCGGTGATTAGCTATGATGGCAGCAACAAATATTATGCGGATAGC |
| | | GTGAAAGGCCGTTTTACCATTAGCCGTGATAACAGCAAAAACACCCTGAGCCTGCAGatgAAC |
| | | AGCCTGCGTGTGGAAGATACCGCGATTTATTATTGCGTGCGTGGCGCGGGCCATGGCTTTCCG |
| | | ACCGGCCCGGATGGCTTTGATATTTGGGGCCAGGGCACCatgGTGACCGTGAGCAGCAAGGGA |
| | | CCCTCGGTGTTCCCTCTCGCCCCCTCATCGAGGAGCACGTCCGAATCGACTGCGGCGCTGGGA |
| | | TGTCTCGTGAAGGACTACTTCCCCGAGCCCGTGACCGTGTCATGGAACTCAGGCGCATTGACC |
| | | TCGGGAGTGCACACGTTCCCGGCAGTGTTGCAGTCGTCGGGCCTTTACTCGCTGTCGTCCGTG |
| | | GTCACGGTGCCTTCGTCGAATTTCGGGACGCAGACTTACACATGTAATGTGGATCACAAACCG |
| | | TCCAATACCAAGGTCGATAAGACGGTCGAAAGGAAATGCTGCGTGGAATGTCCTCCCTGCCCA |
| | | GCACCGCCAGTCGCGGGTCCCAGCGTCTTTTTGTTCCCACCGAAGCCCAAGGACACACTGATG |
| | | ATCAGCCGTACGCCGGAGGTAACATGCGTAGTGGTAGATGTCTCGCATGAGGACCCTGAAGTG |
| | | CAGTTCAATTGGTATGTAGACGGCGTGGAGGTGCACAACGCCAAGACCAAGCCACGAGAAGAA |
| | | CAGTTCAACTCGACTTTTAGAGTGGTATCCGTCCTGACCGTCGTGCACCAGGACTGGCTCAAT |
| | | GGAAAGGAGTACAAATGCAAGGTATCCAACAAGGGGTTGCCAGCTCCAATCGAAAAGACCATC |
| | | TCAAAGACAAAGGGGCAGCCCAGAGAGCCCCAAGTGTATACGCTTCCACCCTCAAGGGAGGAG |
| | | ATGACAAAGAATCAGGTATCACTCACATGTTTGGTGAAAGGGTTTTATCCGAGCGATATTGCG |
| | | GTCGAGTGGGAAAGCAACGGTCAACCGGAGAACAACTATAAGACGACTCCCCCTATGCTGGAC |
| | | AGCGACGGGTCGTTCTTTCTGTATTCCAAACTCACGGTGGACAAATCGAGGTGGCAGCAAGGA |
| | | AACGTATTCTCATGCTCAGTAATGCACGAGGCCCTCCATAATCATTACACGCAGAAATCATTA |
| | | AGCTTATCGCCGGGT |
| 1437 | HC Ab93 | GAAGTGCAGCTGCTGGAAAGCGGCGGCGGCGTGGTGCAGCCGGGCCGTAGCCTGCGTCTGAGC |
| | | TGCGCGGCGAGCGGCTTTACCTTTAGCAGCTATGCGatgCATTGGGTGCGTCAGGCGCCGGGC |
| | | AAAGGCCTGGAATGGGTGGCGGTGATTAGCTATGATGGCAGCAACAAATATTATGCGGATAGC |
| | | GTGAAAGGCCGTTTTACCATTAGCCGTGATAACAGCAAAAACACCCTGAGCCTGCAGatgAAC |
| | | AGCCTGCGTGTGGAAGATACCGCGATTTATTATTGCGTGCGTGGCGCGGGCCTGGGCTTTCCG |
| | | TATGGCCCGGATGGCTTTGATATTTGGGGCCAGGGCACCatgGTGACCGTGAGCAGCAAGGGA |
| | | CCCTCGGTGTTCCCTCTCGCCCCCTCATCGAGGAGCACGTCCGAATCGACTGCGGCGCTGGGA |
| | | TGTCTCGTGAAGGACTACTTCCCCGAGCCCGTGACCGTGTCATGGAACTCAGGCGCATTGACC |
| | | TCGGGAGTGCACACGTTCCCGGCAGTGTTGCAGTCGTCGGGCCTTTACTCGCTGTCGTCCGTG |
| | | GTCACGGTGCCTTCGTCGAATTTCGGGACGCAGACTTACACATGTAATGTGGATCACAAACCG |
| | | TCCAATACCAAGGTCGATAAGACGGTCGAAAGGAAATGCTGCGTGGAATGTCCTCCCTGCCCA |
| | | GCACCGCCAGTCGCGGGTCCCAGCGTCTTTTTGTTCCCACCGAAGCCCAAGGACACACTGATG |
| | | ATCAGCCGTACGCCGGAGGTAACATGCGTAGTGGTAGATGTCTCGCATGAGGACCCTGAAGTG |
| | | CAGTTCAATTGGTATGTAGACGGCGTGGAGGTGCACAACGCCAAGACCAAGCCACGAGAAGAA |
| | | CAGTTCAACTCGACTTTTAGAGTGGTATCCGTCCTGACCGTCGTGCACCAGGACTGGCTCAAT |
| | | GGAAAGGAGTACAAATGCAAGGTATCCAACAAGGGGTTGCCAGCTCCAATCGAAAAGACCATC |
| | | TCAAAGACAAAGGGGCAGCCCAGAGAGCCCCAAGTGTATACGCTTCCACCCTCAAGGGAGGAG |
| | | ATGACAAAGAATCAGGTATCACTCACATGTTTGGTGAAAGGGTTTTATCCGAGCGATATTGCG |
| | | GTCGAGTGGGAAAGCAACGGTCAACCGGAGAACAACTATAAGACGACTCCCCCTATGCTGGAC |
| | | AGCGACGGGTCGTTCTTTCTGTATTCCAAACTCACGGTGGACAAATCGAGGTGGCAGCAAGGA |
| | | AACGTATTCTCATGCTCAGTAATGCACGAGGCCCTCCATAATCATTACACGCAGAAATCATTA |
| | | AGCTTATCGCCGGGT |
| 1438 | HC Ab94 | GAAGTGCAGCTGCTGGAAAGCGGCGGCGGCGTGGTGCAGCCGGGCCGTAGCCTGCGTCTGAGC |
| | | TGCGCGGCGAGCGGCTTTACCTTTAGCAGCTATGCGatgCATTGGGTGCGTCAGGCGCCGGGC |
| | | AAAGGCCTGGAATGGGTGGCGGTGATTAGCTATGATGGCAGCAACAAATATTATGCGGATAGC |
| | | GTGAAAGGCCGTTTTACCATTAGCCGTGATAACAGCAAAAACACCCTGAGCCTGCAGatgAAC |
| | | AGCCTGCGTGTGGAAGATACCGCGATTTATTATTGCGTGCGTGGCGCGGGCCTGGGCTGGCCG |
| | | TATGGCCCGGATGGCTTTGATATTTGGGGCCAGGGCACCatgGTGACCGTGAGCAGCAAGGGA |
| | | CCCTCGGTGTTCCCTCTCGCCCCCTCATCGAGGAGCACGTCCGAATCGACTGCGGCGCTGGGA |
| | | TGTCTCGTGAAGGACTACTTCCCCGAGCCCGTGACCGTGTCATGGAACTCAGGCGCATTGACC |
| | | TCGGGAGTGCACACGTTCCCGGCAGTGTTGCAGTCGTCGGGCCTTTACTCGCTGTCGTCCGTG |
| | | GTCACGGTGCCTTCGTCGAATTTCGGGACGCAGACTTACACATGTAATGTGGATCACAAACCG |
| | | TCCAATACCAAGGTCGATAAGACGGTCGAAAGGAAATGCTGCGTGGAATGTCCTCCCTGCCCA |
| | | GCACCGCCAGTCGCGGGTCCCAGCGTCTTTTTGTTCCCACCGAAGCCCAAGGACACACTGATG |
| | | ATCAGCCGTACGCCGGAGGTAACATGCGTAGTGGTAGATGTCTCGCATGAGGACCCTGAAGTG |
| | | CAGTTCAATTGGTATGTAGACGGCGTGGAGGTGCACAACGCCAAGACCAAGCCACGAGAAGAA |
| | | CAGTTCAACTCGACTTTTAGAGTGGTATCCGTCCTGACCGTCGTGCACCAGGACTGGCTCAAT |
| | | GGAAAGGAGTACAAATGCAAGGTATCCAACAAGGGGTTGCCAGCTCCAATCGAAAAGACCATC |
| | | TCAAAGACAAAGGGGCAGCCCAGAGAGCCCCAAGTGTATACGCTTCCACCCTCAAGGGAGGAG |
| | | ATGACAAAGAATCAGGTATCACTCACATGTTTGGTGAAAGGGTTTTATCCGAGCGATATTGCG |
| | | GTCGAGTGGGAAAGCAACGGTCAACCGGAGAACAACTATAAGACGACTCCCCCTATGCTGGAC |
| | | AGCGACGGGTCGTTCTTTCTGTATTCCAAACTCACGGTGGACAAATCGAGGTGGCAGCAAGGA |
| | | AACGTATTCTCATGCTCAGTAATGCACGAGGCCCTCCATAATCATTACACGCAGAAATCATTA |
| | | AGCTTATCGCCGGGT |
| 1439 | HC Ab95 | GAAGTGCAGCTGCTGGAAAGCGGCGGCGGCGTGGTGCAGCCGGGCCGTAGCCTGCGTCTGAGC |
| | | TGCGCGGCGAGCGGCTTTACCTTTAGCAGCTATGCGatgCATTGGGTGCGTCAGGCGCCGGGC |
| | | AAAGGCCTGGAATGGGTGGCGGTGATTAGCTATGATGGCAGCAACAAATATTATGCGGATAGC |
| | | GTGAAAGGCCGTTTTACCATTAGCCGTGATAACAGCAAAAACACCCTGAGCCTGCAGatgAAC |
| | | AGCCTGCGTGTGGAAGATACCGCGATTTATTATTGCGTGCGTGGCGCGGGCCTGGGCTGGCCG |
| | | TATGGCCCGGATGGCTTTGATATTTGGGGCCAGGGCACCatgGTGACCGTGAGCAGCAAGGGA |
| | | CCCTCGGTGTTCCCTCTCGCCCCCTCATCGAGGAGCACGTCCGAATCGACTGCGGCGCTGGGA |
| | | TGTCTCGTGAAGGACTACTTCCCCGAGCCCGTGACCGTGTCATGGAACTCAGGCGCATTGACC |
| | | TCGGGAGTGCACACGTTCCCGGCAGTGTTGCAGTCGTCGGGCCTTTACTCGCTGTCGTCCGTG |
| | | GTCACGGTGCCTTCGTCGAATTTCGGGACGCAGACTTACACATGTAATGTGGATCACAAACCG |
| | | TCCAATACCAAGGTCGATAAGACGGTCGAAAGGAAATGCTGCGTGGAATGTCCTCCCTGCCCA |
| | | GCACCGCCAGTCGCGGGTCCCAGCGTCTTTTTGTTCCCACCGAAGCCCAAGGACACACTGATG |
| | | ATCAGCCGTACGCCGGAGGTAACATGCGTAGTGGTAGATGTCTCGCATGAGGACCCTGAAGTG |
| | | CAGTTCAATTGGTATGTAGACGGCGTGGAGGTGCACAACGCCAAGACCAAGCCACGAGAAGAA |
| | | CAGTTCAACTCGACTTTTAGAGTGGTATCCGTCCTGACCGTCGTGCACCAGGACTGGCTCAAT |
| | | GGAAAGGAGTACAAATGCAAGGTATCCAACAAGGGGTTGCCAGCTCCAATCGAAAAGACCATC |
| | | TCAAAGACAAAGGGGCAGCCCAGAGAGCCCCAAGTGTATACGCTTCCACCCTCAAGGGAGGAG |
| | | ATGACAAAGAATCAGGTATCACTCACATGTTTGGTGAAAGGGTTTTATCCGAGCGATATTGCG |
| | | GTCGAGTGGGAAAGCAACGGTCAACCGGAGAACAACTATAAGACGACTCCCCCTATGCTGGAC |
| | | AGCGACGGGTCGTTCTTTCTGTATTCCAAACTCACGGTGGACAAATCGAGGTGGCAGCAAGGA |
| | | AACGTATTCTCATGCTCAGTAATGCACGAGGCCCTCCATAATCATTACACGCAGAAATCATTA |
| | | AGCTTATCGCCGGGT |
| 1440 | HC Ab96 | GAAGTGCAGCTGCTGGAAAGCGGCGGCGGCGTGGTGCAGCCGGGCCGTAGCCTGCGTCTGAGC |
| | | TGCGCGGCGAGCGGCTTTACCTTTAGCAGCTATGCGatgCATTGGGTGCGTCAGGCGCCGGGC |
| | | AAAGGCCTGGAATGGGTGGCGGTGATTAGCTATGATGGCAGCAACAAATATTATGCGGATAGC |
| | | GTGAAAGGCCGTTTTACCATTAGCCGTGATAACAGCAAAAACACCCTGAGCCTGCAGatgAAC |
| | | AGCCTGCGTGTGGAAGATACCGCGATTTATTATTGCGTGCGTGGCGCGGGCCTGGGCTGGCCG |
| | | TATGGCCCGGATGGCTTTGATATTTGGGGCCAGGGCACCatgGTGACCGTGAGCAGCAAGGGA |
| | | CCCTCGGTGTTCCCTCTCGCCCCCTCATCGAGGAGCACGTCCGAATCGACTGCGGCGCTGGGA |
| | | TGTCTCGTGAAGGACTACTTCCCCGAGCCCGTGACCGTGTCATGGAACTCAGGCGCATTGACC |
| | | TCGGGAGTGCACACGTTCCCGGCAGTGTTGCAGTCGTCGGGCCTTTACTCGCTGTCGTCCGTG |
| | | GTCACGGTGCCTTCGTCGAATTTCGGGACGCAGACTTACACATGTAATGTGGATCACAAACCG |
| | | TCCAATACCAAGGTCGATAAGACGGTCGAAAGGAAATGCTGCGTGGAATGTCCTCCCTGCCCA |
| | | GCACCGCCAGTCGCGGGTCCCAGCGTCTTTTTGTTCCCACCGAAGCCCAAGGACACACTGATG |
| | | ATCAGCCGTACGCCGGAGGTAACATGCGTAGTGGTAGATGTCTCGCATGAGGACCCTGAAGTG |
| | | CAGTTCAATTGGTATGTAGACGGCGTGGAGGTGCACAACGCCAAGACCAAGCCACGAGAAGAA |
| | | CAGTTCAACTCGACTTTTAGAGTGGTATCCGTCCTGACCGTCGTGCACCAGGACTGGCTCAAT |
| | | GGAAAGGAGTACAAATGCAAGGTATCCAACAAGGGGTTGCCAGCTCCAATCGAAAAGACCATC |
| | | TCAAAGACAAAGGGGCAGCCCAGAGAGCCCCAAGTGTATACGCTTCCACCCTCAAGGGAGGAG |
| | | ATGACAAAGAATCAGGTATCACTCACATGTTTGGTGAAAGGGTTTTATCCGAGCGATATTGCG |
| | | GTCGAGTGGGAAAGCAACGGTCAACCGGAGAACAACTATAAGACGACTCCCCCTATGCTGGAC |
| | | AGCGACGGGTCGTTCTTTCTGTATTCCAAACTCACGGTGGACAAATCGAGGTGGCAGCAAGGA |
| | | AACGTATTCTCATGCTCAGTAATGCACGAGGCCCTCCATAATCATTACACGCAGAAATCATTA |
| | | AGCTTATCGCCGGGT |
| 1441 | HC Ab97 | GAAGTGCAGCTGCTGGAAAGCGGCGGCGGCGTGGTGCAGCCGGGCCGTAGCCTGCGTCTGAGC |
| | | TGCGCGGCGAGCGGCTTTACCTTTAGCAGCTATGCGatgCATTGGGTGCGTCAGGCGCCGGGC |
| | | AAAGGCCTGGAATGGGTGGCGGTGATTAGCTATGATGGCAGCAACAAATATTATGCGGATAGC |
| | | GTGAAAGGCCGTTTTACCATTAGCCGTGATAACAGCAAAAACACCCTGAGCCTGCAGatgAAC |
| | | AGCCTGCGTGTGGAAGATACCGCGATTTATTATTGCGTGCGTGGCGCGGGCCTGGGCTGGCCG |
| | | TATGGCCCGGATGGCTTTGATATTTGGGGCCAGGGCACCatgGTGACCGTGAGCAGCAAGGGA |
| | | CCCTCGGTGTTCCCTCTCGCCCCCTCATCGAGGAGCACGTCCGAATCGACTGCGGCGCTGGGA |
| | | TGTCTCGTGAAGGACTACTTCCCCGAGCCCGTGACCGTGTCATGGAACTCAGGCGCATTGACC |
| | | TCGGGAGTGCACACGTTCCCGGCAGTGTTGCAGTCGTCGGGCCTTTACTCGCTGTCGTCCGTG |
| | | GTCACGGTGCCTTCGTCGAATTTCGGGACGCAGACTTACACATGTAATGTGGATCACAAACCG |
| | | TCCAATACCAAGGTCGATAAGACGGTCGAAAGGAAATGCTGCGTGGAATGTCCTCCCTGCCCA |
| | | GCACCGCCAGTCGCGGGTCCCAGCGTCTTTTTGTTCCCACCGAAGCCCAAGGACACACTGATG |
| | | ATCAGCCGTACGCCGGAGGTAACATGCGTAGTGGTAGATGTCTCGCATGAGGACCCTGAAGTG |
| | | CAGTTCAATTGGTATGTAGACGGCGTGGAGGTGCACAACGCCAAGACCAAGCCACGAGAAGAA |
| | | CAGTTCAACTCGACTTTTAGAGTGGTATCCGTCCTGACCGTCGTGCACCAGGACTGGCTCAAT |
| | | GGAAAGGAGTACAAATGCAAGGTATCCAACAAGGGGTTGCCAGCTCCAATCGAAAAGACCATC |
| | | TCAAAGACAAAGGGGCAGCCCAGAGAGCCCCAAGTGTATACGCTTCCACCCTCAAGGGAGGAG |
| | | ATGACAAAGAATCAGGTATCACTCACATGTTTGGTGAAAGGGTTTTATCCGAGCGATATTGCG |
| | | GTCGAGTGGGAAAGCAACGGTCAACCGGAGAACAACTATAAGACGACTCCCCCTATGCTGGAC |
| | | AGCGACGGGTCGTTCTTTCTGTATTCCAAACTCACGGTGGACAAATCGAGGTGGCAGCAAGGA |
| | | AACGTATTCTCATGCTCAGTAATGCACGAGGCCCTCCATAATCATTACACGCAGAAATCATTA |
| | | AGCTTATCGCCGGGT |
| 1442 | HC Ab98 | GAAGTGCAGCTGCTGGAAAGCGGCGGCGGCGTGGTGCAGCCGGGCCGTAGCCTGCGTCTGAGC |
| | | TGCGCGGCGAGCGGCTTTACCTTTAGCAGCTATGCGatgCATTGGGTGCGTCAGGCGCCGGGC |
| | | AAAGGCCTGGAATGGGTGGCGGTGATTAGCTATGATGGCAGCAACAAATATTATGCGGATAGC |
| | | GTGAAAGGCCGTTTTACCATTAGCCGTGATAACAGCAAAAACACCCTGAGCCTGCAGatgAAC |
| | | AGCCTGCGTGTGGAAGATACCGCGATTTATTATTGCGTGCGTGGCGCGGGCCTGGGCTGGCCG |
| | | TATGGCCCGGATGGCTTTGATATTTGGGGCCAGGGCACCatgGTGACCGTGAGCAGCAAGGGA |
| | | CCCTCGGTGTTCCCTCTCGCCCCCTCATCGAGGAGCACGTCCGAATCGACTGCGGCGCTGGGA |
| | | TGTCTCGTGAAGGACTACTTCCCCGAGCCCGTGACCGTGTCATGGAACTCAGGCGCATTGACC |
| | | TCGGGAGTGCACACGTTCCCGGCAGTGTTGCAGTCGTCGGGCCTTTACTCGCTGTCGTCCGTG |
| | | GTCACGGTGCCTTCGTCGAATTTCGGGACGCAGACTTACACATGTAATGTGGATCACAAACCG |
| | | TCCAATACCAAGGTCGATAAGACGGTCGAAAGGAAATGCTGCGTGGAATGTCCTCCCTGCCCA |
| | | GCACCGCCAGTCGCGGGTCCCAGCGTCTTTTTGTTCCCACCGAAGCCCAAGGACACACTGATG |
| | | ATCAGCCGTACGCCGGAGGTAACATGCGTAGTGGTAGATGTCTCGCATGAGGACCCTGAAGTG |
| | | CAGTTCAATTGGTATGTAGACGGCGTGGAGGTGCACAACGCCAAGACCAAGCCACGAGAAGAA |
| | | CAGTTCAACTCGACTTTTAGAGTGGTATCCGTCCTGACCGTCGTGCACCAGGACTGGCTCAAT |
| | | GGAAAGGAGTACAAATGCAAGGTATCCAACAAGGGGTTGCCAGCTCCAATCGAAAAGACCATC |
| | | TCAAAGACAAAGGGGCAGCCCAGAGAGCCCCAAGTGTATACGCTTCCACCCTCAAGGGAGGAG |
| | | ATGACAAAGAATCAGGTATCACTCACATGTTTGGTGAAAGGGTTTTATCCGAGCGATATTGCG |
| | | GTCGAGTGGGAAAGCAACGGTCAACCGGAGAACAACTATAAGACGACTCCCCCTATGCTGGAC |
| | | AGCGACGGGTCGTTCTTTCTGTATTCCAAACTCACGGTGGACAAATCGAGGTGGCAGCAAGGA |
| | | AACGTATTCTCATGCTCAGTAATGCACGAGGCCCTCCATAATCATTACACGCAGAAATCATTA |
| | | AGCTTATCGCCGGGT |
| 1443 | HC Ab99 | GAAGTGCAGCTGCTGGAAAGCGGCGGCGGCGTGGTGCAGCCGGGCCGTAGCCTGCGTCTGAGC |
| | | TGCGCGGCGAGCGGCTTTACCTTTAGCAGCTATGCGatgCATTGGGTGCGTCAGGCGCCGGGC |
| | | AAAGGCCTGGAATGGGTGGCGGTGATTAGCTATGATGGCAGCAACAAATATTATGCGGATAGC |
| | | GTGAAAGGCCGTTTTACCATTAGCCGTGATAACAGCAAAAACACCCTGAGCCTGCAGatgAAC |
| | | AGCCTGCGTGTGGAAGATACCGCGATTTATTATTGCGTGCGTGGCGCGGGCCTGGGCTGGCCG |
| | | TATGGCCCGGATGGCTTTGATATTTGGGGCCAGGGCACCatgGTGACCGTGAGCAGCAAGGGA |
| | | CCCTCGGTGTTCCCTCTCGCCCCCTCATCGAGGAGCACGTCCGAATCGACTGCGGCGCTGGGA |
| | | TGTCTCGTGAAGGACTACTTCCCCGAGCCCGTGACCGTGTCATGGAACTCAGGCGCATTGACC |
| | | TCGGGAGTGCACACGTTCCCGGCAGTGTTGCAGTCGTCGGGCCTTTACTCGCTGTCGTCCGTG |
| | | GTCACGGTGCCTTCGTCGAATTTCGGGACGCAGACTTACACATGTAATGTGGATCACAAACCG |
| | | TCCAATACCAAGGTCGATAAGACGGTCGAAAGGAAATGCTGCGTGGAATGTCCTCCCTGCCCA |
| | | GCACCGCCAGTCGCGGGTCCCAGCGTCTTTTTGTTCCCACCGAAGCCCAAGGACACACTGATG |
| | | ATCAGCCGTACGCCGGAGGTAACATGCGTAGTGGTAGATGTCTCGCATGAGGACCCTGAAGTG |
| | | CAGTTCAATTGGTATGTAGACGGCGTGGAGGTGCACAACGCCAAGACCAAGCCACGAGAAGAA |
| | | CAGTTCAACTCGACTTTTAGAGTGGTATCCGTCCTGACCGTCGTGCACCAGGACTGGCTCAAT |
| | | GGAAAGGAGTACAAATGCAAGGTATCCAACAAGGGGTTGCCAGCTCCAATCGAAAAGACCATC |
| | | TCAAAGACAAAGGGGCAGCCCAGAGAGCCCCAAGTGTATACGCTTCCACCCTCAAGGGAGGAG |
| | | ATGACAAAGAATCAGGTATCACTCACATGTTTGGTGAAAGGGTTTTATCCGAGCGATATTGCG |
| | | GTCGAGTGGGAAAGCAACGGTCAACCGGAGAACAACTATAAGACGACTCCCCCTATGCTGGAC |
| | | AGCGACGGGTCGTTCTTTCTGTATTCCAAACTCACGGTGGACAAATCGAGGTGGCAGCAAGGA |
| | | AACGTATTCTCATGCTCAGTAATGCACGAGGCCCTCCATAATCATTACACGCAGAAATCATTA |
| | | AGCTTATCGCCGGGT |
| 1444 | HC Ab100 | GAAGTGCAGCTGCTGGAAAGCGGCGGCGGCGTGGTGCAGCCGGGCCGTAGCCTGCGTCTGAGC |
| | | TGCGCGGCGAGCGGCTTTACCTTTAGCAGCTATGCGatgCATTGGGTGCGTCAGGCGCCGGGC |
| | | AAAGGCCTGGAATGGGTGGCGGTGATTAGCTATGATGGCAGCAACAAATATTATGCGGATAGC |
| | | GTGAAAGGCCGTTTTACCATTAGCCGTGATAACAGCAAAAACACCCTGAGCCTGCAGatgAAC |
| | | AGCCTGCGTGTGGAAGATACCGCGATTTATTATTGCGTGCGTGGCGCGGGCCTGGGCTGGCCG |
| | | TATGGCCCGGATGGCTTTGATATTTGGGGCCAGGGCACCatgGTGACCGTGAGCAGCAAGGGA |
| | | CCCTCGGTGTTCCCTCTCGCCCCCTCATCGAGGAGCACGTCCGAATCGACTGCGGCGCTGGGA |
| | | TGTCTCGTGAAGGACTACTTCCCCGAGCCCGTGACCGTGTCATGGAACTCAGGCGCATTGACC |
| | | TCGGGAGTGCACACGTTCCCGGCAGTGTTGCAGTCGTCGGGCCTTTACTCGCTGTCGTCCGTG |
| | | GTCACGGTGCCTTCGTCGAATTTCGGGACGCAGACTTACACATGTAATGTGGATCACAAACCG |
| | | TCCAATACCAAGGTCGATAAGACGGTCGAAAGGAAATGCTGCGTGGAATGTCCTCCCTGCCCA |
| | | GCACCGCCAGTCGCGGGTCCCAGCGTCTTTTTGTTCCCACCGAAGCCCAAGGACACACTGATG |
| | | ATCAGCCGTACGCCGGAGGTAACATGCGTAGTGGTAGATGTCTCGCATGAGGACCCTGAAGTG |
| | | CAGTTCAATTGGTATGTAGACGGCGTGGAGGTGCACAACGCCAAGACCAAGCCACGAGAAGAA |
| | | CAGTTCAACTCGACTTTTAGAGTGGTATCCGTCCTGACCGTCGTGCACCAGGACTGGCTCAAT |
| | | GGAAAGGAGTACAAATGCAAGGTATCCAACAAGGGGTTGCCAGCTCCAATCGAAAAGACCATC |
| | | TCAAAGACAAAGGGGCAGCCCAGAGAGCCCCAAGTGTATACGCTTCCACCCTCAAGGGAGGAG |
| | | ATGACAAAGAATCAGGTATCACTCACATGTTTGGTGAAAGGGTTTTATCCGAGCGATATTGCG |
| | | GTCGAGTGGGAAAGCAACGGTCAACCGGAGAACAACTATAAGACGACTCCCCCTATGCTGGAC |
| | | AGCGACGGGTCGTTCTTTCTGTATTCCAAACTCACGGTGGACAAATCGAGGTGGCAGCAAGGA |
| | | AACGTATTCTCATGCTCAGTAATGCACGAGGCCCTCCATAATCATTACACGCAGAAATCATTA |
| | | AGCTTATCGCCGGGT |
| 1445 | HC Ab101 | GAAGTGCAGCTGCTGGAAAGCGGCGGCGGCGTGGTGCAGCCGGGCCGTAGCCTGCGTCTGAGC |
| | | TGCGCGGCGAGCGGCTTTACCTTTAGCAGCTATGCGatgCATTGGGTGCGTCAGGCGCCGGGC |
| | | AAAGGCCTGGAATGGGTGGCGGTGATTAGCTATGATGGCAGCAACAAATATTATGCGGATAGC |
| | | GTGAAAGGCCGTTTTACCATTAGCCGTGATAACAGCAAAAACACCCTGAGCCTGCAGatgAAC |
| | | AGCCTGCGTGTGGAAGATACCGCGATTTATTATTGCGTGCGTGGCGCGGGCCGTGGCTTTACC |
| | | CTGGGCCCGGATGGCTTTGATATTTGGGGCCAGGGCACCatgGTGACCGTGAGCAGCAAGGGA |
| | | CCCTCGGTGTTCCCTCTCGCCCCCTCATCGAGGAGCACGTCCGAATCGACTGCGGCGCTGGGA |
| | | TGTCTCGTGAAGGACTACTTCCCCGAGCCCGTGACCGTGTCATGGAACTCAGGCGCATTGACC |
| | | TCGGGAGTGCACACGTTCCCGGCAGTGTTGCAGTCGTCGGGCCTTTACTCGCTGTCGTCCGTG |
| | | GTCACGGTGCCTTCGTCGAATTTCGGGACGCAGACTTACACATGTAATGTGGATCACAAACCG |
| | | TCCAATACCAAGGTCGATAAGACGGTCGAAAGGAAATGCTGCGTGGAATGTCCTCCCTGCCCA |
| | | GCACCGCCAGTCGCGGGTCCCAGCGTCTTTTTGTTCCCACCGAAGCCCAAGGACACACTGATG |
| | | ATCAGCCGTACGCCGGAGGTAACATGCGTAGTGGTAGATGTCTCGCATGAGGACCCTGAAGTG |
| | | CAGTTCAATTGGTATGTAGACGGCGTGGAGGTGCACAACGCCAAGACCAAGCCACGAGAAGAA |
| | | CAGTTCAACTCGACTTTTAGAGTGGTATCCGTCCTGACCGTCGTGCACCAGGACTGGCTCAAT |
| | | GGAAAGGAGTACAAATGCAAGGTATCCAACAAGGGGTTGCCAGCTCCAATCGAAAAGACCATC |
| | | TCAAAGACAAAGGGGCAGCCCAGAGAGCCCCAAGTGTATACGCTTCCACCCTCAAGGGAGGAG |
| | | ATGACAAAGAATCAGGTATCACTCACATGTTTGGTGAAAGGGTTTTATCCGAGCGATATTGCG |
| | | GTCGAGTGGGAAAGCAACGGTCAACCGGAGAACAACTATAAGACGACTCCCCCTATGCTGGAC |
| | | AGCGACGGGTCGTTCTTTCTGTATTCCAAACTCACGGTGGACAAATCGAGGTGGCAGCAAGGA |
| | | AACGTATTCTCATGCTCAGTAATGCACGAGGCCCTCCATAATCATTACACGCAGAAATCATTA |
| | | AGCTTATCGCCGGGT |
| 1446 | HC Ab102 | GAAGTGCAGCTGCTGGAAAGCGGCGGCGGCGTGGTGCAGCCGGGCCGTAGCCTGCGTCTGAGC |
| | | TGCGCGGCGAGCGGCTTTACCTTTAGCAGCTATGCGatgCATTGGGTGCGTCAGGCGCCGGGC |
| | | AAAGGCCTGGAATGGGTGGCGGTGATTAGCTATGATGGCAGCAACAAATATTATGCGGATAGC |
| | | GTGAAAGGCCGTTTTACCATTAGCCGTGATAACAGCAAAAACACCCTGAGCCTGCAGatgAAC |
| | | AGCCTGCGTGTGGAAGATACCGCGATTTATTATTGCGTGCGTGGCGCGGGCCGTGGCTTTACC |
| | | CTGGGCCCGGATGGCTTTGATATTTGGGGCCAGGGCACCatgGTGACCGTGAGCAGCAAGGGA |
| | | CCCTCGGTGTTCCCTCTCGCCCCCTCATCGAGGAGCACGTCCGAATCGACTGCGGCGCTGGGA |
| | | TGTCTCGTGAAGGACTACTTCCCCGAGCCCGTGACCGTGTCATGGAACTCAGGCGCATTGACC |
| | | TCGGGAGTGCACACGTTCCCGGCAGTGTTGCAGTCGTCGGGCCTTTACTCGCTGTCGTCCGTG |
| | | GTCACGGTGCCTTCGTCGAATTTCGGGACGCAGACTTACACATGTAATGTGGATCACAAACCG |
| | | TCCAATACCAAGGTCGATAAGACGGTCGAAAGGAAATGCTGCGTGGAATGTCCTCCCTGCCCA |
| | | GCACCGCCAGTCGCGGGTCCCAGCGTCTTTTTGTTCCCACCGAAGCCCAAGGACACACTGATG |
| | | ATCAGCCGTACGCCGGAGGTAACATGCGTAGTGGTAGATGTCTCGCATGAGGACCCTGAAGTG |
| | | CAGTTCAATTGGTATGTAGACGGCGTGGAGGTGCACAACGCCAAGACCAAGCCACGAGAAGAA |
| | | CAGTTCAACTCGACTTTTAGAGTGGTATCCGTCCTGACCGTCGTGCACCAGGACTGGCTCAAT |
| | | GGAAAGGAGTACAAATGCAAGGTATCCAACAAGGGGTTGCCAGCTCCAATCGAAAAGACCATC |
| | | TCAAAGACAAAGGGGCAGCCCAGAGAGCCCCAAGTGTATACGCTTCCACCCTCAAGGGAGGAG |
| | | ATGACAAAGAATCAGGTATCACTCACATGTTTGGTGAAAGGGTTTTATCCGAGCGATATTGCG |
| | | GTCGAGTGGGAAAGCAACGGTCAACCGGAGAACAACTATAAGACGACTCCCCCTATGCTGGAC |
| | | AGCGACGGGTCGTTCTTTCTGTATTCCAAACTCACGGTGGACAAATCGAGGTGGCAGCAAGGA |
| | | AACGTATTCTCATGCTCAGTAATGCACGAGGCCCTCCATAATCATTACACGCAGAAATCATTA |
| | | AGCTTATCGCCGGGT |
| 1447 | HC Ab103 | GAAGTGCAGCTGCTGGAAAGCGGCGGCGGCGTGGTGCAGCCGGGCCGTAGCCTGCGTCTGAGC |
| | | TGCGCGGCGAGCGGCTTTACCTTTAGCAGCTATGCGatgCATTGGGTGCGTCAGGCGCCGGGC |
| | | AAAGGCCTGGAATGGGTGGCGGTGATTAGCTATGATGGCAGCAACAAATATTATGCGGATAGC |
| | | GTGAAAGGCCGTTTTACCATTAGCCGTGATAACAGCAAAAACACCCTGAGCCTGCAGatgAAC |
| | | AGCCTGCGTGTGGAAGATACCGCGATTTATTATTGCGTGCGTGGCGCGGGCCGTGGCTTTACC |
| | | CTGGGCCCGGATGGCTTTGATATTTGGGGCCAGGGCACCatgGTGACCGTGAGCAGCAAGGGA |
| | | CCCTCGGTGTTCCCTCTCGCCCCCTCATCGAGGAGCACGTCCGAATCGACTGCGGCGCTGGGA |
| | | TGTCTCGTGAAGGACTACTTCCCCGAGCCCGTGACCGTGTCATGGAACTCAGGCGCATTGACC |
| | | TCGGGAGTGCACACGTTCCCGGCAGTGTTGCAGTCGTCGGGCCTTTACTCGCTGTCGTCCGTG |
| | | GTCACGGTGCCTTCGTCGAATTTCGGGACGCAGACTTACACATGTAATGTGGATCACAAACCG |
| | | TCCAATACCAAGGTCGATAAGACGGTCGAAAGGAAATGCTGCGTGGAATGTCCTCCCTGCCCA |
| | | GCACCGCCAGTCGCGGGTCCCAGCGTCTTTTTGTTCCCACCGAAGCCCAAGGACACACTGATG |
| | | ATCAGCCGTACGCCGGAGGTAACATGCGTAGTGGTAGATGTCTCGCATGAGGACCCTGAAGTG |
| | | CAGTTCAATTGGTATGTAGACGGCGTGGAGGTGCACAACGCCAAGACCAAGCCACGAGAAGAA |
| | | CAGTTCAACTCGACTTTTAGAGTGGTATCCGTCCTGACCGTCGTGCACCAGGACTGGCTCAAT |
| | | GGAAAGGAGTACAAATGCAAGGTATCCAACAAGGGGTTGCCAGCTCCAATCGAAAAGACCATC |
| | | TCAAAGACAAAGGGGCAGCCCAGAGAGCCCCAAGTGTATACGCTTCCACCCTCAAGGGAGGAG |
| | | ATGACAAAGAATCAGGTATCACTCACATGTTTGGTGAAAGGGTTTTATCCGAGCGATATTGCG |
| | | GTCGAGTGGGAAAGCAACGGTCAACCGGAGAACAACTATAAGACGACTCCCCCTATGCTGGAC |
| | | AGCGACGGGTCGTTCTTTCTGTATTCCAAACTCACGGTGGACAAATCGAGGTGGCAGCAAGGA |
| | | AACGTATTCTCATGCTCAGTAATGCACGAGGCCCTCCATAATCATTACACGCAGAAATCATTA |
| | | AGCTTATCGCCGGGT |
| 1448 | HC Ab104 | GAAGTGCAGCTGCTGGAAAGCGGCGGCGGCGTGGTGCAGCCGGGCCGTAGCCTGCGTCTGAGC |
| | | TGCGCGGCGAGCGGCTTTACCTTTAGCAGCTATGCGatgCATTGGGTGCGTCAGGCGCCGGGC |
| | | AAAGGCCTGGAATGGGTGGCGGTGATTAGCTATGATGGCAGCAACAAATATTATGCGGATAGC |
| | | GTGAAAGGCCGTTTTACCATTAGCCGTGATAACAGCAAAAACACCCTGAGCCTGCAGatgAAC |
| | | AGCCTGCGTGTGGAAGATACCGCGATTTATTATTGCGTGCGTGGCGCGGGCCGTGGCTTTACC |
| | | CTGGGCCCGGATGGCTTTGATATTTGGGGCCAGGGCACCatgGTGACCGTGAGCAGCAAGGGA |
| | | CCCTCGGTGTTCCCTCTCGCCCCCTCATCGAGGAGCACGTCCGAATCGACTGCGGCGCTGGGA |
| | | TGTCTCGTGAAGGACTACTTCCCCGAGCCCGTGACCGTGTCATGGAACTCAGGCGCATTGACC |
| | | TCGGGAGTGCACACGTTCCCGGCAGTGTTGCAGTCGTCGGGCCTTTACTCGCTGTCGTCCGTG |
| | | GTCACGGTGCCTTCGTCGAATTTCGGGACGCAGACTTACACATGTAATGTGGATCACAAACCG |
| | | TCCAATACCAAGGTCGATAAGACGGTCGAAAGGAAATGCTGCGTGGAATGTCCTCCCTGCCCA |
| | | GCACCGCCAGTCGCGGGTCCCAGCGTCTTTTTGTTCCCACCGAAGCCCAAGGACACACTGATG |
| | | ATCAGCCGTACGCCGGAGGTAACATGCGTAGTGGTAGATGTCTCGCATGAGGACCCTGAAGTG |
| | | CAGTTCAATTGGTATGTAGACGGCGTGGAGGTGCACAACGCCAAGACCAAGCCACGAGAAGAA |
| | | CAGTTCAACTCGACTTTTAGAGTGGTATCCGTCCTGACCGTCGTGCACCAGGACTGGCTCAAT |
| | | GGAAAGGAGTACAAATGCAAGGTATCCAACAAGGGGTTGCCAGCTCCAATCGAAAAGACCATC |
| | | TCAAAGACAAAGGGGCAGCCCAGAGAGCCCCAAGTGTATACGCTTCCACCCTCAAGGGAGGAG |
| | | ATGACAAAGAATCAGGTATCACTCACATGTTTGGTGAAAGGGTTTTATCCGAGCGATATTGCG |
| | | GTCGAGTGGGAAAGCAACGGTCAACCGGAGAACAACTATAAGACGACTCCCCCTATGCTGGAC |
| | | AGCGACGGGTCGTTCTTTCTGTATTCCAAACTCACGGTGGACAAATCGAGGTGGCAGCAAGGA |
| | | AACGTATTCTCATGCTCAGTAATGCACGAGGCCCTCCATAATCATTACACGCAGAAATCATTA |
| | | AGCTTATCGCCGGGT |
| 1449 | HC Ab105 | GAAGTGCAGCTGCTGGAAAGCGGCGGCGGCGTGGTGCAGCCGGGCCGTAGCCTGCGTCTGAGC |
| | | TGCGCGGCGAGCGGCTTTACCTTTAGCAGCTATGCGatgCATTGGGTGCGTCAGGCGCCGGGC |
| | | AAAGGCCTGGAATGGGTGGCGGTGATTAGCTATGATGGCAGCAACAAATATTATGCGGATAGC |
| | | GTGAAAGGCCGTTTTACCATTAGCCGTGATAACAGCAAAAACACCCTGAGCCTGCAGatgAAC |
| | | AGCCTGCGTGTGGAAGATACCGCGATTTATTATTGCGTGCGTGGCGCGGGCCGTGGCTTTACC |
| | | CTGGGCCCGGATGGCTTTGATATTTGGGGCCAGGGCACCatgGTGACCGTGAGCAGCAAGGGA |
| | | CCCTCGGTGTTCCCTCTCGCCCCCTCATCGAGGAGCACGTCCGAATCGACTGCGGCGCTGGGA |
| | | TGTCTCGTGAAGGACTACTTCCCCGAGCCCGTGACCGTGTCATGGAACTCAGGCGCATTGACC |
| | | TCGGGAGTGCACACGTTCCCGGCAGTGTTGCAGTCGTCGGGCCTTTACTCGCTGTCGTCCGTG |
| | | GTCACGGTGCCTTCGTCGAATTTCGGGACGCAGACTTACACATGTAATGTGGATCACAAACCG |
| | | TCCAATACCAAGGTCGATAAGACGGTCGAAAGGAAATGCTGCGTGGAATGTCCTCCCTGCCCA |
| | | GCACCGCCAGTCGCGGGTCCCAGCGTCTTTTTGTTCCCACCGAAGCCCAAGGACACACTGATG |
| | | ATCAGCCGTACGCCGGAGGTAACATGCGTAGTGGTAGATGTCTCGCATGAGGACCCTGAAGTG |
| | | CAGTTCAATTGGTATGTAGACGGCGTGGAGGTGCACAACGCCAAGACCAAGCCACGAGAAGAA |
| | | CAGTTCAACTCGACTTTTAGAGTGGTATCCGTCCTGACCGTCGTGCACCAGGACTGGCTCAAT |
| | | GGAAAGGAGTACAAATGCAAGGTATCCAACAAGGGGTTGCCAGCTCCAATCGAAAAGACCATC |
| | | TCAAAGACAAAGGGGCAGCCCAGAGAGCCCCAAGTGTATACGCTTCCACCCTCAAGGGAGGAG |
| | | ATGACAAAGAATCAGGTATCACTCACATGTTTGGTGAAAGGGTTTTATCCGAGCGATATTGCG |
| | | GTCGAGTGGGAAAGCAACGGTCAACCGGAGAACAACTATAAGACGACTCCCCCTATGCTGGAC |
| | | AGCGACGGGTCGTTCTTTCTGTATTCCAAACTCACGGTGGACAAATCGAGGTGGCAGCAAGGA |
| | | AACGTATTCTCATGCTCAGTAATGCACGAGGCCCTCCATAATCATTACACGCAGAAATCATTA |
| | | AGCTTATCGCCGGGT |
| 1450 | HC Ab106 | GAAGTGCAGCTGCTGGAAAGCGGCGGCGGCGTGGTGCAGCCGGGCCGTAGCCTGCGTCTGAGC |
| | | TGCGCGGCGAGCGGCTTTACCTTTAGCAGCTATGCGatgCATTGGGTGCGTCAGGCGCCGGGC |
| | | AAAGGCCTGGAATGGGTGGCGGTGATTAGCTATGATGGCAGCAACAAATATTATGCGGATAGC |
| | | GTGAAAGGCCGTTTTACCATTAGCCGTGATAACAGCAAAAACACCCTGAGCCTGCAGatgAAC |
| | | AGCCTGCGTGTGGAAGATACCGCGATTTATTATTGCGTGCGTGGCGCGGGCCGTGGCTTTACC |
| | | CTGGGCCCGGATGGCTTTGATATTTGGGGCCAGGGCACCatgGTGACCGTGAGCAGCAAGGGA |
| | | CCCTCGGTGTTCCCTCTCGCCCCCTCATCGAGGAGCACGTCCGAATCGACTGCGGCGCTGGGA |
| | | TGTCTCGTGAAGGACTACTTCCCCGAGCCCGTGACCGTGTCATGGAACTCAGGCGCATTGACC |
| | | TCGGGAGTGCACACGTTCCCGGCAGTGTTGCAGTCGTCGGGCCTTTACTCGCTGTCGTCCGTG |
| | | GTCACGGTGCCTTCGTCGAATTTCGGGACGCAGACTTACACATGTAATGTGGATCACAAACCG |
| | | TCCAATACCAAGGTCGATAAGACGGTCGAAAGGAAATGCTGCGTGGAATGTCCTCCCTGCCCA |
| | | GCACCGCCAGTCGCGGGTCCCAGCGTCTTTTTGTTCCCACCGAAGCCCAAGGACACACTGATG |
| | | ATCAGCCGTACGCCGGAGGTAACATGCGTAGTGGTAGATGTCTCGCATGAGGACCCTGAAGTG |
| | | CAGTTCAATTGGTATGTAGACGGCGTGGAGGTGCACAACGCCAAGACCAAGCCACGAGAAGAA |
| | | CAGTTCAACTCGACTTTTAGAGTGGTATCCGTCCTGACCGTCGTGCACCAGGACTGGCTCAAT |
| | | GGAAAGGAGTACAAATGCAAGGTATCCAACAAGGGGTTGCCAGCTCCAATCGAAAAGACCATC |
| | | TCAAAGACAAAGGGGCAGCCCAGAGAGCCCCAAGTGTATACGCTTCCACCCTCAAGGGAGGAG |
| | | ATGACAAAGAATCAGGTATCACTCACATGTTTGGTGAAAGGGTTTTATCCGAGCGATATTGCG |
| | | GTCGAGTGGGAAAGCAACGGTCAACCGGAGAACAACTATAAGACGACTCCCCCTATGCTGGAC |
| | | AGCGACGGGTCGTTCTTTCTGTATTCCAAACTCACGGTGGACAAATCGAGGTGGCAGCAAGGA |
| | | AACGTATTCTCATGCTCAGTAATGCACGAGGCCCTCCATAATCATTACACGCAGAAATCATTA |
| | | AGCTTATCGCCGGGT |
| 1451 | HC Ab107 | GAAGTGCAGCTGCTGGAAAGCGGCGGCGGCGTGGTGCAGCCGGGCCGTAGCCTGCGTCTGAGC |
| | | TGCGCGGCGAGCGGCTTTACCTTTAGCAGCTATGCGatgCATTGGGTGCGTCAGGCGCCGGGC |
| | | AAAGGCCTGGAATGGGTGGCGGTGATTAGCTATGATGGCAGCAACAAATATTATGCGGATAGC |
| | | GTGAAAGGCCGTTTTACCATTAGCCGTGATAACAGCAAAAACACCCTGAGCCTGCAGatgAAC |
| | | AGCCTGCGTGTGGAAGATACCGCGATTTATTATTGCGTGCGTGGCGCGGGCCGTGGCTTTACC |
| | | CTGGGCCCGGATGGCTTTGATATTTGGGGCCAGGGCACCatgGTGACCGTGAGCAGCAAGGGA |
| | | CCCTCGGTGTTCCCTCTCGCCCCCTCATCGAGGAGCACGTCCGAATCGACTGCGGCGCTGGGA |
| | | TGTCTCGTGAAGGACTACTTCCCCGAGCCCGTGACCGTGTCATGGAACTCAGGCGCATTGACC |
| | | TCGGGAGTGCACACGTTCCCGGCAGTGTTGCAGTCGTCGGGCCTTTACTCGCTGTCGTCCGTG |
| | | GTCACGGTGCCTTCGTCGAATTTCGGGACGCAGACTTACACATGTAATGTGGATCACAAACCG |
| | | TCCAATACCAAGGTCGATAAGACGGTCGAAAGGAAATGCTGCGTGGAATGTCCTCCCTGCCCA |
| | | GCACCGCCAGTCGCGGGTCCCAGCGTCTTTTTGTTCCCACCGAAGCCCAAGGACACACTGATG |
| | | ATCAGCCGTACGCCGGAGGTAACATGCGTAGTGGTAGATGTCTCGCATGAGGACCCTGAAGTG |
| | | CAGTTCAATTGGTATGTAGACGGCGTGGAGGTGCACAACGCCAAGACCAAGCCACGAGAAGAA |
| | | CAGTTCAACTCGACTTTTAGAGTGGTATCCGTCCTGACCGTCGTGCACCAGGACTGGCTCAAT |
| | | GGAAAGGAGTACAAATGCAAGGTATCCAACAAGGGGTTGCCAGCTCCAATCGAAAAGACCATC |
| | | TCAAAGACAAAGGGGCAGCCCAGAGAGCCCCAAGTGTATACGCTTCCACCCTCAAGGGAGGAG |
| | | ATGACAAAGAATCAGGTATCACTCACATGTTTGGTGAAAGGGTTTTATCCGAGCGATATTGCG |
| | | GTCGAGTGGGAAAGCAACGGTCAACCGGAGAACAACTATAAGACGACTCCCCCTATGCTGGAC |
| | | AGCGACGGGTCGTTCTTTCTGTATTCCAAACTCACGGTGGACAAATCGAGGTGGCAGCAAGGA |
| | | AACGTATTCTCATGCTCAGTAATGCACGAGGCCCTCCATAATCATTACACGCAGAAATCATTA |
| | | AGCTTATCGCCGGGT |
| 1452 | LC Ab16 | GATATTGTGatgACCCAGACCCCGCTGAGCCTGAGCGTGACCCCGGGCCAGCCGGCGAGCATT |
| | | AGCTGCAAAAGCAGCCGTAGCCTGCTGCATAGCGATGGCAAAACCTATGTGTATTGGTATGTG |
| | | CAGAAAAGCGGCCAGCCGCCGCAGCTGCTGATTTATGAACTGAGCAACCGTTTTAGCGGCGTG |
| | | CCGGATCGTTTTAGCGGCAGCGGCAGCCGTACCGATTTTACCCTGAAAATTAGCCGTGTGGAA |
| | | GCGGAAGATGTGGGCGTGTATTATTGCatgCAGTATATTGAAGCGCCGCTGACCTTTGGCGGC |
| | | GGCACCAAAGTGGAAATTAAACGTACGGTGGCGGCGCCCAGTGTATTCATCTTCCCTCCCTCC |
| | | GACGAGCAGTTGAAGTCGGGGACCGCGTCAGTCGTGTGCCTGCTCAATAACTTTTACCCGCGA |
| | | GAGGCTAAGGTCCAGTGGAAAGTGGATAATGCGCTGCAAAGCGGAAACTCCCAAGAATCAGTG |
| | | ACGGAACAAGACTCAAAAGACTCGACGTATTCGCTCTCATCGACGCTCACGCTTTCAAAAGCA |
| | | GATTACGAGAAGCACAAGGTGTATGCATGTGAAGTGACACACCAGGGTTTGTCGTCGCCAGTC |
| | | ACCAAGTCATTCAACCGCGGAGAGTGC |
| 1453 | LC Ab17 | GATATTGTGatgACCCAGACCCCGCTGAGCCTGAGCGTGACCCCGGGCCAGCCGGCGAGCATT |
| | | AGCTGCAAAAGCAGCCGTAGCCTGCTGCATAGCGATGGCAAAACCTATGTGTATTGGTATGTG |
| | | CAGAAAAGCGGCCAGCCGCCGCAGCTGCTGATTTATGAACTGAGCAACCGTTTTAGCGGCGTG |
| | | CCGGATCGTTTTAGCGGCAGCGGCAGCCGTACCGATTTTACCCTGAAAATTAGCCGTGTGGAA |
| | | GCGGAAGATGTGGGCGTGTATTATTGCatgCAGTATATTGAAGCGCCGCTGACCTTTGGCGGC |
| | | GGCACCAAAGTGGAAATTAAACGTACGGTGGCGGCGCCCAGTGTATTCATCTTCCCTCCCTCC |
| | | GACGAGCAGTTGAAGTCGGGGACCGCGTCAGTCGTGTGCCTGCTCAATAACTTTTACCCGCGA |
| | | GAGGCTAAGGTCCAGTGGAAAGTGGATAATGCGCTGCAAAGCGGAAACTCCCAAGAATCAGTG |
| | | ACGGAACAAGACTCAAAAGACTCGACGTATTCGCTCTCATCGACGCTCACGCTTTCAAAAGCA |
| | | GATTACGAGAAGCACAAGGTGTATGCATGTGAAGTGACACACCAGGGTTTGTCGTCGCCAGTC |
| | | ACCAAGTCATTCAACCGCGGAGAGTGC |
| 1454 | LC Ab18 | GATATTGTGatgACCCAGACCCCGCTGAGCCTGAGCGTGACCCCGGGCCAGCCGGCGAGCATT |
| | | AGCTGCAAAAGCAGCCGTAGCCTGCTGCATAGCGATGGCAAAACCTATGTGTATTGGTATGTG |
| | | CAGAAAAGCGGCCAGCCGCCGCAGCTGCTGATTTATGAACTGAGCAACCGTTTTAGCGGCGTG |
| | | CCGGATCGTTTTAGCGGCAGCGGCAGCCGTACCGATTTTACCCTGAAAATTAGCCGTGTGGAA |
| | | GCGGAAGATGTGGGCGTGTATTATTGCatgCAGTATATTGAAGCGCCGCTGACCTTTGGCGGC |
| | | GGCACCAAAGTGGAAATTAAACGTACGGTGGCGGCGCCCAGTGTATTCATCTTCCCTCCCTCC |
| | | GACGAGCAGTTGAAGTCGGGGACCGCGTCAGTCGTGTGCCTGCTCAATAACTTTTACCCGCGA |
| | | GAGGCTAAGGTCCAGTGGAAAGTGGATAATGCGCTGCAAAGCGGAAACTCCCAAGAATCAGTG |
| | | ACGGAACAAGACTCAAAAGACTCGACGTATTCGCTCTCATCGACGCTCACGCTTTCAAAAGCA |
| | | GATTACGAGAAGCACAAGGTGTATGCATGTGAAGTGACACACCAGGGTTTGTCGTCGCCAGTC |
| | | ACCAAGTCATTCAACCGCGGAGAGTGC |
| 1455 | LC Ab19 | GATATTGTGatgACCCAGACCCCGCTGAGCCTGAGCGTGACCCCGGGCCAGCCGGCGAGCATT |
| | | AGCTGCAAAAGCAGCCGTAGCCTGCTGCATAGCGATGGCAAAACCTATGTGTATTGGTATGTG |
| | | CAGAAAAGCGGCCAGCCGCCGCAGCTGCTGATTTATGAACTGAGCAACCGTTTTAGCGGCGTG |
| | | CCGGATCGTTTTAGCGGCAGCGGCAGCCGTACCGATTTTACCCTGAAAATTAGCCGTGTGGAA |
| | | GCGGAAGATGTGGGCGTGTATTATTGCatgCAGTATATTGAAGCGCCGCTGACCTTTGGCGGC |
| | | GGCACCAAAGTGGAAATTAAACGTACGGTGGCGGCGCCCAGTGTATTCATCTTCCCTCCCTCC |
| | | GACGAGCAGTTGAAGTCGGGGACCGCGTCAGTCGTGTGCCTGCTCAATAACTTTTACCCGCGA |
| | | GAGGCTAAGGTCCAGTGGAAAGTGGATAATGCGCTGCAAAGCGGAAACTCCCAAGAATCAGTG |
| | | ACGGAACAAGACTCAAAAGACTCGACGTATTCGCTCTCATCGACGCTCACGCTTTCAAAAGCA |
| | | GATTACGAGAAGCACAAGGTGTATGCATGTGAAGTGACACACCAGGGTTTGTCGTCGCCAGTC |
| | | ACCAAGTCATTCAACCGCGGAGAGTGC |
| 1456 | LC Ab20 | GATATTGTGatgACCCAGACCCCGCTGAGCCTGAGCGTGACCCCGGGCCAGCCGGCGAGCATT |
| | | AGCTGCAAAAGCAGCCGTAGCCTGCTGCATAGCGATGGCAAAACCTATGTGTATTGGTATGTG |
| | | CAGAAAAGCGGCCAGCCGCCGCAGCTGCTGATTTATGAACTGAGCAACCGTTTTAGCGGCGTG |
| | | CCGGATCGTTTTAGCGGCAGCGGCAGCCGTACCGATTTTACCCTGAAAATTAGCCGTGTGGAA |
| | | GCGGAAGATGTGGGCGTGTATTATTGCatgCAGTATATTGAAGCGCCGCTGACCTTTGGCGGC |
| | | GGCACCAAAGTGGAAATTAAACGTACGGTGGCGGCGCCCAGTGTATTCATCTTCCCTCCCTCC |
| | | GACGAGCAGTTGAAGTCGGGGACCGCGTCAGTCGTGTGCCTGCTCAATAACTTTTACCCGCGA |
| | | GAGGCTAAGGTCCAGTGGAAAGTGGATAATGCGCTGCAAAGCGGAAACTCCCAAGAATCAGTG |
| | | ACGGAACAAGACTCAAAAGACTCGACGTATTCGCTCTCATCGACGCTCACGCTTTCAAAAGCA |
| | | GATTACGAGAAGCACAAGGTGTATGCATGTGAAGTGACACACCAGGGTTTGTCGTCGCCAGTC |
| | | ACCAAGTCATTCAACCGCGGAGAGTGC |
| 1457 | LC Ab21 | GATATTGTGatgACCCAGACCCCGCTGAGCCTGAGCGTGACCCCGGGCCAGCCGGCGAGCATT |
| | | AGCTGCAAAAGCAGCCGTAGCCTGCTGCATAGCGATGGCAAAACCTATGTGTATTGGTATGTG |
| | | CAGAAAAGCGGCCAGCCGCCGCAGCTGCTGATTTATGAACTGAGCAACCGTTTTAGCGGCGTG |
| | | CCGGATCGTTTTAGCGGCAGCGGCAGCCGTACCGATTTTACCCTGAAAATTAGCCGTGTGGAA |
| | | GCGGAAGATGTGGGCGTGTATTATTGCatgCAGTATATTGAAGCGCCGCTGACCTTTGGCGGC |
| | | GGCACCAAAGTGGAAATTAAACGTACGGTGGCGGCGCCCAGTGTATTCATCTTCCCTCCCTCC |
| | | GACGAGCAGTTGAAGTCGGGGACCGCGTCAGTCGTGTGCCTGCTCAATAACTTTTACCCGCGA |
| | | GAGGCTAAGGTCCAGTGGAAAGTGGATAATGCGCTGCAAAGCGGAAACTCCCAAGAATCAGTG |
| | | ACGGAACAAGACTCAAAAGACTCGACGTATTCGCTCTCATCGACGCTCACGCTTTCAAAAGCA |
| | | GATTACGAGAAGCACAAGGTGTATGCATGTGAAGTGACACACCAGGGTTTGTCGTCGCCAGTC |
| | | ACCAAGTCATTCAACCGCGGAGAGTGC |
| 1458 | LC Ab22 | GATATTGTGatgACCCAGACCCCGCTGAGCCTGAGCGTGACCCCGGGCCAGCCGGCGAGCATT |
| | | AGCTGCAAAAGCAGCCGTAGCCTGCTGCATAGCGATGGCAAAACCTATGTGTATTGGTATGTG |
| | | CAGAAAAGCGGCCAGCCGCCGCAGCTGCTGATTTATGAACTGAGCAACCGTTTTAGCGGCGTG |
| | | CCGGATCGTTTTAGCGGCAGCGGCAGCCGTACCGATTTTACCCTGAAAATTAGCCGTGTGGAA |
| | | GCGGAAGATGTGGGCGTGTATTATTGCatgCAGTATATTGAAGCGCCGCTGACCTTTGGCGGC |
| | | GGCACCAAAGTGGAAATTAAACGTACGGTGGCGGCGCCCAGTGTATTCATCTTCCCTCCCTCC |
| | | GACGAGCAGTTGAAGTCGGGGACCGCGTCAGTCGTGTGCCTGCTCAATAACTTTTACCCGCGA |
| | | GAGGCTAAGGTCCAGTGGAAAGTGGATAATGCGCTGCAAAGCGGAAACTCCCAAGAATCAGTG |
| | | ACGGAACAAGACTCAAAAGACTCGACGTATTCGCTCTCATCGACGCTCACGCTTTCAAAAGCA |
| | | GATTACGAGAAGCACAAGGTGTATGCATGTGAAGTGACACACCAGGGTTTGTCGTCGCCAGTC |
| | | ACCAAGTCATTCAACCGCGGAGAGTGC |
| 1459 | LC Ab23 | GATATTGTGatgACCCAGACCCCGCTGAGCCTGAGCGTGACCCCGGGCCAGCCGGCGAGCATT |
| | | AGCTGCAAAAGCAGCCGTAGCCTGCTGCATAGCGATGGCAAAACCTATGTGTATTGGTATGTG |
| | | CAGAAAAGCGGCCAGCCGCCGCAGCTGCTGATTTATGAACTGAGCAACCGTTTTAGCGGCGTG |
| | | CCGGATCGTTTTAGCGGCAGCGGCAGCCGTACCGATTTTACCCTGAAAATTAGCCGTGTGGAA |
| | | GCGGAAGATGTGGGCGTGTATTATTGCatgCAGTATATTGAAGCGCCGCTGACCTTTGGCGGC |
| | | GGCACCAAAGTGGAAATTAAACGTACGGTGGCGGCGCCCAGTGTATTCATCTTCCCTCCCTCC |
| | | GACGAGCAGTTGAAGTCGGGGACCGCGTCAGTCGTGTGCCTGCTCAATAACTTTTACCCGCGA |
| | | GAGGCTAAGGTCCAGTGGAAAGTGGATAATGCGCTGCAAAGCGGAAACTCCCAAGAATCAGTG |
| | | ACGGAACAAGACTCAAAAGACTCGACGTATTCGCTCTCATCGACGCTCACGCTTTCAAAAGCA |
| | | GATTACGAGAAGCACAAGGTGTATGCATGTGAAGTGACACACCAGGGTTTGTCGTCGCCAGTC |
| | | ACCAAGTCATTCAACCGCGGAGAGTGC |
| 1460 | LC Ab24 | GATATTGTGatgACCCAGACCCCGCTGAGCCTGAGCGTGACCCCGGGCCAGCCGGCGAGCATT |
| | | AGCTGCAAAAGCAGCCGTAGCCTGCTGCATAGCGATGGCAAAACCTATGTGTATTGGTATGTG |
| | | CAGAAAAGCGGCCAGCCGCCGCAGCTGCTGATTTATGAACTGAGCAACCGTTTTAGCGGCGTG |
| | | CCGGATCGTTTTAGCGGCAGCGGCAGCCGTACCGATTTTACCCTGAAAATTAGCCGTGTGGAA |
| | | GCGGAAGATGTGGGCGTGTATTATTGCatgCAGTATATTGAAGCGCCGCTGACCTTTGGCGGC |
| | | GGCACCAAAGTGGAAATTAAACGTACGGTGGCGGCGCCCAGTGTATTCATCTTCCCTCCCTCC |
| | | GACGAGCAGTTGAAGTCGGGGACCGCGTCAGTCGTGTGCCTGCTCAATAACTTTTACCCGCGA |
| | | GAGGCTAAGGTCCAGTGGAAAGTGGATAATGCGCTGCAAAGCGGAAACTCCCAAGAATCAGTG |
| | | ACGGAACAAGACTCAAAAGACTCGACGTATTCGCTCTCATCGACGCTCACGCTTTCAAAAGCA |
| | | GATTACGAGAAGCACAAGGTGTATGCATGTGAAGTGACACACCAGGGTTTGTCGTCGCCAGTC |
| | | ACCAAGTCATTCAACCGCGGAGAGTGC |
| 1461 | LC Ab25 | GATATTGTGatgACCCAGACCCCGCTGAGCCTGAGCGTGACCCCGGGCCAGCCGGCGAGCATT |
| | | AGCTGCAAAAGCAGCCGTAGCCTGCTGCATAGCGATGGCAAAACCTATGTGTATTGGTATGTG |
| | | CAGAAAAGCGGCCAGCCGCCGCAGCTGCTGATTTATGAACTGAGCAACCGTTTTAGCGGCGTG |
| | | CCGGATCGTTTTAGCGGCAGCGGCAGCCGTACCGATTTTACCCTGAAAATTAGCCGTGTGGAA |
| | | GCGGAAGATGTGGGCGTGTATTATTGCatgCAGTATATTGAAGCGCCGCTGACCTTTGGCGGC |
| | | GGCACCAAAGTGGAAATTAAACGTACGGTGGCGGCGCCCAGTGTATTCATCTTCCCTCCCTCC |
| | | GACGAGCAGTTGAAGTCGGGGACCGCGTCAGTCGTGTGCCTGCTCAATAACTTTTACCCGCGA |
| | | GAGGCTAAGGTCCAGTGGAAAGTGGATAATGCGCTGCAAAGCGGAAACTCCCAAGAATCAGTG |
| | | ACGGAACAAGACTCAAAAGACTCGACGTATTCGCTCTCATCGACGCTCACGCTTTCAAAAGCA |
| | | GATTACGAGAAGCACAAGGTGTATGCATGTGAAGTGACACACCAGGGTTTGTCGTCGCCAGTC |
| | | ACCAAGTCATTCAACCGCGGAGAGTGC |
| 1462 | LC Ab26 | GATATTGTGatgACCCAGACCCCGCTGAGCCTGAGCGTGACCCCGGGCCAGCCGGCGAGCATT |
| | | AGCTGCAAAAGCAGCCGTAGCCTGCTGCATAGCGATGGCAAAACCTATGTGTATTGGTATGTG |
| | | CAGAAAAGCGGCCAGCCGCCGCAGCTGCTGATTTATGAACTGAGCAACCGTTTTAGCGGCGTG |
| | | CCGGATCGTTTTAGCGGCAGCGGCAGCCGTACCGATTTTACCCTGAAAATTAGCCGTGTGGAA |
| | | GCGGAAGATGTGGGCGTGTATTATTGCatgCAGTATATTGAAGCGCCGCTGACCTTTGGCGGC |
| | | GGCACCAAAGTGGAAATTAAACGTACGGTGGCGGCGCCCAGTGTATTCATCTTCCCTCCCTCC |
| | | GACGAGCAGTTGAAGTCGGGGACCGCGTCAGTCGTGTGCCTGCTCAATAACTTTTACCCGCGA |
| | | GAGGCTAAGGTCCAGTGGAAAGTGGATAATGCGCTGCAAAGCGGAAACTCCCAAGAATCAGTG |
| | | ACGGAACAAGACTCAAAAGACTCGACGTATTCGCTCTCATCGACGCTCACGCTTTCAAAAGCA |
| | | GATTACGAGAAGCACAAGGTGTATGCATGTGAAGTGACACACCAGGGTTTGTCGTCGCCAGTC |
| | | ACCAAGTCATTCAACCGCGGAGAGTGC |
| 1463 | LC Ab27 | GATATTGTGatgACCCAGACCCCGCTGAGCCTGAGCGTGACCCCGGGCCAGCCGGCGAGCATT |
| | | AGCTGCAAAAGCAGCCGTAGCCTGCTGCATAGCGATGGCAAAACCTATGTGTATTGGTATGTG |
| | | CAGAAAAGCGGCCAGCCGCCGCAGCTGCTGATTTATGAACTGAGCAACCGTTTTAGCGGCGTG |
| | | CCGGATCGTTTTAGCGGCAGCGGCAGCCGTACCGATTTTACCCTGAAAATTAGCCGTGTGGAA |
| | | GCGGAAGATGTGGGCGTGTATTATTGCatgCAGTATATTGAAGCGCCGCTGACCTTTGGCGGC |
| | | GGCACCAAAGTGGAAATTAAACGTACGGTGGCGGCGCCCAGTGTATTCATCTTCCCTCCCTCC |
| | | GACGAGCAGTTGAAGTCGGGGACCGCGTCAGTCGTGTGCCTGCTCAATAACTTTTACCCGCGA |
| | | GAGGCTAAGGTCCAGTGGAAAGTGGATAATGCGCTGCAAAGCGGAAACTCCCAAGAATCAGTG |
| | | ACGGAACAAGACTCAAAAGACTCGACGTATTCGCTCTCATCGACGCTCACGCTTTCAAAAGCA |
| | | GATTACGAGAAGCACAAGGTGTATGCATGTGAAGTGACACACCAGGGTTTGTCGTCGCCAGTC |
| | | ACCAAGTCATTCAACCGCGGAGAGTGC |
| 1464 | LC Ab28 | GATATTGTGatgACCCAGACCCCGCTGAGCCTGAGCGTGACCCCGGGCCAGCCGGCGAGCATT |
| | | AGCTGCAAAAGCAGCCGTAGCCTGCTGCATAGCGATGGCAAAACCTATGTGTATTGGTATGTG |
| | | CAGAAAAGCGGCCAGCCGCCGCAGCTGCTGATTTATGAACTGAGCAACCGTTTTAGCGGCGTG |
| | | CCGGATCGTTTTAGCGGCAGCGGCAGCCGTACCGATTTTACCCTGAAAATTAGCCGTGTGGAA |
| | | GCGGAAGATGTGGGCGTGTATTATTGCatgCAGTATATTGAAGCGCCGCTGACCTTTGGCGGC |
| | | GGCACCAAAGTGGAAATTAAACGTACGGTGGCGGCGCCCAGTGTATTCATCTTCCCTCCCTCC |
| | | GACGAGCAGTTGAAGTCGGGGACCGCGTCAGTCGTGTGCCTGCTCAATAACTTTTACCCGCGA |
| | | GAGGCTAAGGTCCAGTGGAAAGTGGATAATGCGCTGCAAAGCGGAAACTCCCAAGAATCAGTG |
| | | ACGGAACAAGACTCAAAAGACTCGACGTATTCGCTCTCATCGACGCTCACGCTTTCAAAAGCA |
| | | GATTACGAGAAGCACAAGGTGTATGCATGTGAAGTGACACACCAGGGTTTGTCGTCGCCAGTC |
| | | ACCAAGTCATTCAACCGCGGAGAGTGC |
| 1465 | LC Ab29 | GATATTGTGatgACCCAGACCCCGCTGAGCCTGAGCGTGACCCCGGGCCAGCCGGCGAGCATT |
| | | AGCTGCACCAGCAGCCGTAGCCTGCTGCATAGCGATGGCAAAACCTATGTGTATTGGTATGTG |
| | | CAGAAAAGCGGCCAGCCGCCGCAGCTGCTGATTTATGAACTGAGCAACCGTTTTAGCGGCGTG |
| | | CCGGATCGTTTTAGCGGCAGCGGCAGCCGTACCGATTTTACCCTGAAAATTAGCCGTGTGGAA |
| | | GCGGAAGATGTGGGCGTGTATTATTGCatgCAGTATGTGGAAGCGCCGCTGACCTTTGGCGGC |
| | | GGCACCAAAGTGGAAATTAAACGTACGGTGGCGGCGCCCAGTGTATTCATCTTCCCTCCCTCC |
| | | GACGAGCAGTTGAAGTCGGGGACCGCGTCAGTCGTGTGCCTGCTCAATAACTTTTACCCGCGA |
| | | GAGGCTAAGGTCCAGTGGAAAGTGGATAATGCGCTGCAAAGCGGAAACTCCCAAGAATCAGTG |
| | | ACGGAACAAGACTCAAAAGACTCGACGTATTCGCTCTCATCGACGCTCACGCTTTCAAAAGCA |
| | | GATTACGAGAAGCACAAGGTGTATGCATGTGAAGTGACACACCAGGGTTTGTCGTCGCCAGTC |
| | | ACCAAGTCATTCAACCGCGGAGAGTGC |
| 1466 | LC Ab30 | GATATTGTGatgACCCAGACCCCGCTGAGCCTGAGCGTGACCCCGGGCCAGCCGGCGAGCATT |
| | | AGCTGCACCAGCAGCCGTAGCCTGCTGCATAGCGATGGCAAAACCTATGTGTATTGGTATGTG |
| | | CAGAAAAGCGGCCAGCCGCCGCAGCTGCTGATTTATGAACTGAGCAACCGTTTTAGCGGCGTG |
| | | CCGGATCGTTTTAGCGGCAGCGGCAGCCGTACCGATTTTACCCTGAAAATTAGCCGTGTGGAA |
| | | GCGGAAGATGTGGGCGTGTATTATTGCatgCAGTATGTGGAAGCGCCGCTGACCTTTGGCGGC |
| | | GGCACCAAAGTGGAAATTAAACGTACGGTGGCGGCGCCCAGTGTATTCATCTTCCCTCCCTCC |
| | | GACGAGCAGTTGAAGTCGGGGACCGCGTCAGTCGTGTGCCTGCTCAATAACTTTTACCCGCGA |
| | | GAGGCTAAGGTCCAGTGGAAAGTGGATAATGCGCTGCAAAGCGGAAACTCCCAAGAATCAGTG |
| | | ACGGAACAAGACTCAAAAGACTCGACGTATTCGCTCTCATCGACGCTCACGCTTTCAAAAGCA |
| | | GATTACGAGAAGCACAAGGTGTATGCATGTGAAGTGACACACCAGGGTTTGTCGTCGCCAGTC |
| | | ACCAAGTCATTCAACCGCGGAGAGTGC |
| 1467 | LC Ab31 | GATATTGTGatgACCCAGACCCCGCTGAGCCTGAGCGTGACCCCGGGCCAGCCGGCGAGCATT |
| | | AGCTGCACCAGCAGCCGTAGCCTGCTGCATAGCGATGGCAAAACCTATGTGTATTGGTATGTG |
| | | CAGAAAAGCGGCCAGCCGCCGCAGCTGCTGATTTATGAACTGAGCAACCGTTTTAGCGGCGTG |
| | | CCGGATCGTTTTAGCGGCAGCGGCAGCCGTACCGATTTTACCCTGAAAATTAGCCGTGTGGAA |
| | | GCGGAAGATGTGGGCGTGTATTATTGCatgCAGTATGTGGAAGCGCCGCTGACCTTTGGCGGC |
| | | GGCACCAAAGTGGAAATTAAACGTACGGTGGCGGCGCCCAGTGTATTCATCTTCCCTCCCTCC |
| | | GACGAGCAGTTGAAGTCGGGGACCGCGTCAGTCGTGTGCCTGCTCAATAACTTTTACCCGCGA |
| | | GAGGCTAAGGTCCAGTGGAAAGTGGATAATGCGCTGCAAAGCGGAAACTCCCAAGAATCAGTG |
| | | ACGGAACAAGACTCAAAAGACTCGACGTATTCGCTCTCATCGACGCTCACGCTTTCAAAAGCA |
| | | GATTACGAGAAGCACAAGGTGTATGCATGTGAAGTGACACACCAGGGTTTGTCGTCGCCAGTC |
| | | ACCAAGTCATTCAACCGCGGAGAGTGC |
| 1468 | LC Ab32 | GATATTGTGatgACCCAGACCCCGCTGAGCCTGAGCGTGACCCCGGGCCAGCCGGCGAGCATT |
| | | AGCTGCACCAGCAGCCGTAGCCTGCTGCATAGCGATGGCAAAACCTATGTGTATTGGTATGTG |
| | | CAGAAAAGCGGCCAGCCGCCGCAGCTGCTGATTTATGAACTGAGCAACCGTTTTAGCGGCGTG |
| | | CCGGATCGTTTTAGCGGCAGCGGCAGCCGTACCGATTTTACCCTGAAAATTAGCCGTGTGGAA |
| | | GCGGAAGATGTGGGCGTGTATTATTGCatgCAGTATGTGGAAGCGCCGCTGACCTTTGGCGGC |
| | | GGCACCAAAGTGGAAATTAAACGTACGGTGGCGGCGCCCAGTGTATTCATCTTCCCTCCCTCC |
| | | GACGAGCAGTTGAAGTCGGGGACCGCGTCAGTCGTGTGCCTGCTCAATAACTTTTACCCGCGA |
| | | GAGGCTAAGGTCCAGTGGAAAGTGGATAATGCGCTGCAAAGCGGAAACTCCCAAGAATCAGTG |
| | | ACGGAACAAGACTCAAAAGACTCGACGTATTCGCTCTCATCGACGCTCACGCTTTCAAAAGCA |
| | | GATTACGAGAAGCACAAGGTGTATGCATGTGAAGTGACACACCAGGGTTTGTCGTCGCCAGTC |
| | | ACCAAGTCATTCAACCGCGGAGAGTGC |
| 1469 | LC Ab33 | GATATTGTGatgACCCAGACCCCGCTGAGCCTGAGCGTGACCCCGGGCCAGCCGGCGAGCATT |
| | | AGCTGCACCAGCAGCCGTAGCCTGCTGCATAGCGATGGCAAAACCTATGTGTATTGGTATGTG |
| | | CAGAAAAGCGGCCAGCCGCCGCAGCTGCTGATTTATGAACTGAGCAACCGTTTTAGCGGCGTG |
| | | CCGGATCGTTTTAGCGGCAGCGGCAGCCGTACCGATTTTACCCTGAAAATTAGCCGTGTGGAA |
| | | GCGGAAGATGTGGGCGTGTATTATTGCatgCAGTATGTGGAAGCGCCGCTGACCTTTGGCGGC |
| | | GGCACCAAAGTGGAAATTAAACGTACGGTGGCGGCGCCCAGTGTATTCATCTTCCCTCCCTCC |
| | | GACGAGCAGTTGAAGTCGGGGACCGCGTCAGTCGTGTGCCTGCTCAATAACTTTTACCCGCGA |
| | | GAGGCTAAGGTCCAGTGGAAAGTGGATAATGCGCTGCAAAGCGGAAACTCCCAAGAATCAGTG |
| | | ACGGAACAAGACTCAAAAGACTCGACGTATTCGCTCTCATCGACGCTCACGCTTTCAAAAGCA |
| | | GATTACGAGAAGCACAAGGTGTATGCATGTGAAGTGACACACCAGGGTTTGTCGTCGCCAGTC |
| | | ACCAAGTCATTCAACCGCGGAGAGTGC |
| 1470 | LC Ab34 | GATATTGTGatgACCCAGACCCCGCTGAGCCTGAGCGTGACCCCGGGCCAGCCGGCGAGCATT |
| | | AGCTGCACCAGCAGCCGTAGCCTGCTGCATAGCGATGGCAAAACCTATGTGTATTGGTATGTG |
| | | CAGAAAAGCGGCCAGCCGCCGCAGCTGCTGATTTATGAACTGAGCAACCGTTTTAGCGGCGTG |
| | | CCGGATCGTTTTAGCGGCAGCGGCAGCCGTACCGATTTTACCCTGAAAATTAGCCGTGTGGAA |
| | | GCGGAAGATGTGGGCGTGTATTATTGCatgCAGTATGTGGAAGCGCCGCTGACCTTTGGCGGC |
| | | GGCACCAAAGTGGAAATTAAACGTACGGTGGCGGCGCCCAGTGTATTCATCTTCCCTCCCTCC |
| | | GACGAGCAGTTGAAGTCGGGGACCGCGTCAGTCGTGTGCCTGCTCAATAACTTTTACCCGCGA |
| | | GAGGCTAAGGTCCAGTGGAAAGTGGATAATGCGCTGCAAAGCGGAAACTCCCAAGAATCAGTG |
| | | ACGGAACAAGACTCAAAAGACTCGACGTATTCGCTCTCATCGACGCTCACGCTTTCAAAAGCA |
| | | GATTACGAGAAGCACAAGGTGTATGCATGTGAAGTGACACACCAGGGTTTGTCGTCGCCAGTC |
| | | ACCAAGTCATTCAACCGCGGAGAGTGC |
| 1471 | LC Ab35 | GATATTGTGatgACCCAGACCCCGCTGAGCCTGAGCGTGACCCCGGGCCAGCCGGCGAGCATT |
| | | AGCTGCACCAGCAGCCGTAGCCTGCTGCATAGCGATGGCAAAACCTATGTGTATTGGTATGTG |
| | | CAGAAAAGCGGCCAGCCGCCGCAGCTGCTGATTTATGAACTGAGCAACCGTTTTAGCGGCGTG |
| | | CCGGATCGTTTTAGCGGCAGCGGCAGCCGTACCGATTTTACCCTGAAAATTAGCCGTGTGGAA |
| | | GCGGAAGATGTGGGCGTGTATTATTGCatgCAGTATGTGGAAGCGCCGCTGACCTTTGGCGGC |
| | | GGCACCAAAGTGGAAATTAAACGTACGGTGGCGGCGCCCAGTGTATTCATCTTCCCTCCCTCC |
| | | GACGAGCAGTTGAAGTCGGGGACCGCGTCAGTCGTGTGCCTGCTCAATAACTTTTACCCGCGA |
| | | GAGGCTAAGGTCCAGTGGAAAGTGGATAATGCGCTGCAAAGCGGAAACTCCCAAGAATCAGTG |
| | | ACGGAACAAGACTCAAAAGACTCGACGTATTCGCTCTCATCGACGCTCACGCTTTCAAAAGCA |
| | | GATTACGAGAAGCACAAGGTGTATGCATGTGAAGTGACACACCAGGGTTTGTCGTCGCCAGTC |
| | | ACCAAGTCATTCAACCGCGGAGAGTGC |
| 1472 | LC Ab36 | GATATTGTGatgACCCAGACCCCGCTGAGCCTGAGCGTGACCCCGGGCCAGCCGGCGAGCATT |
| | | AGCTGCCGTAGCAGCCGTAGCCTGCTGCATAGCGATGGCAAAACCTATGTGTATTGGTATGTG |
| | | CAGAAAAGCGGCCAGCCGCCGCAGCTGCTGATTTATGAACTGAGCAACCGTTTTAGCGGCGTG |
| | | CCGGATCGTTTTAGCGGCAGCGGCAGCCGTACCGATTTTACCCTGAAAATTAGCCGTGTGGAA |
| | | GCGGAAGATGTGGGCGTGTATTATTGCatgCAGTATATTGAAGCGCCGCTGACCTTTGGCGGC |
| | | GGCACCAAAGTGGAAATTAAACGTACGGTGGCGGCGCCCAGTGTATTCATCTTCCCTCCCTCC |
| | | GACGAGCAGTTGAAGTCGGGGACCGCGTCAGTCGTGTGCCTGCTCAATAACTTTTACCCGCGA |
| | | GAGGCTAAGGTCCAGTGGAAAGTGGATAATGCGCTGCAAAGCGGAAACTCCCAAGAATCAGTG |
| | | ACGGAACAAGACTCAAAAGACTCGACGTATTCGCTCTCATCGACGCTCACGCTTTCAAAAGCA |
| | | GATTACGAGAAGCACAAGGTGTATGCATGTGAAGTGACACACCAGGGTTTGTCGTCGCCAGTC |
| | | ACCAAGTCATTCAACCGCGGAGAGTGC |
| 1473 | LC Ab37 | GATATTGTGatgACCCAGACCCCGCTGAGCCTGAGCGTGACCCCGGGCCAGCCGGCGAGCATT |
| | | AGCTGCCGTAGCAGCCGTAGCCTGCTGCATAGCGATGGCAAAACCTATGTGTATTGGTATGTG |
| | | CAGAAAAGCGGCCAGCCGCCGCAGCTGCTGATTTATGAACTGAGCAACCGTTTTAGCGGCGTG |
| | | CCGGATCGTTTTAGCGGCAGCGGCAGCCGTACCGATTTTACCCTGAAAATTAGCCGTGTGGAA |
| | | GCGGAAGATGTGGGCGTGTATTATTGCatgCAGTATATTGAAGCGCCGCTGACCTTTGGCGGC |
| | | GGCACCAAAGTGGAAATTAAACGTACGGTGGCGGCGCCCAGTGTATTCATCTTCCCTCCCTCC |
| | | GACGAGCAGTTGAAGTCGGGGACCGCGTCAGTCGTGTGCCTGCTCAATAACTTTTACCCGCGA |
| | | GAGGCTAAGGTCCAGTGGAAAGTGGATAATGCGCTGCAAAGCGGAAACTCCCAAGAATCAGTG |
| | | ACGGAACAAGACTCAAAAGACTCGACGTATTCGCTCTCATCGACGCTCACGCTTTCAAAAGCA |
| | | GATTACGAGAAGCACAAGGTGTATGCATGTGAAGTGACACACCAGGGTTTGTCGTCGCCAGTC |
| | | ACCAAGTCATTCAACCGCGGAGAGTGC |
| 1474 | LC Ab38 | GATATTGTGatgACCCAGACCCCGCTGAGCCTGAGCGTGACCCCGGGCCAGCCGGCGAGCATT |
| | | AGCTGCCGTAGCAGCCGTAGCCTGCTGCATAGCGATGGCAAAACCTATGTGTATTGGTATGTG |
| | | CAGAAAAGCGGCCAGCCGCCGCAGCTGCTGATTTATGAACTGAGCAACCGTTTTAGCGGCGTG |
| | | CCGGATCGTTTTAGCGGCAGCGGCAGCCGTACCGATTTTACCCTGAAAATTAGCCGTGTGGAA |
| | | GCGGAAGATGTGGGCGTGTATTATTGCatgCAGTATATTGAAGCGCCGCTGACCTTTGGCGGC |
| | | GGCACCAAAGTGGAAATTAAACGTACGGTGGCGGCGCCCAGTGTATTCATCTTCCCTCCCTCC |
| | | GACGAGCAGTTGAAGTCGGGGACCGCGTCAGTCGTGTGCCTGCTCAATAACTTTTACCCGCGA |
| | | GAGGCTAAGGTCCAGTGGAAAGTGGATAATGCGCTGCAAAGCGGAAACTCCCAAGAATCAGTG |
| | | ACGGAACAAGACTCAAAAGACTCGACGTATTCGCTCTCATCGACGCTCACGCTTTCAAAAGCA |
| | | GATTACGAGAAGCACAAGGTGTATGCATGTGAAGTGACACACCAGGGTTTGTCGTCGCCAGTC |
| | | ACCAAGTCATTCAACCGCGGAGAGTGC |
| 1475 | LC Ab39 | GATATTGTGatgACCCAGACCCCGCTGAGCCTGAGCGTGACCCCGGGCCAGCCGGCGAGCATT |
| | | AGCTGCCGTAGCAGCCGTAGCCTGCTGCATAGCGATGGCAAAACCTATGTGTATTGGTATGTG |
| | | CAGAAAAGCGGCCAGCCGCCGCAGCTGCTGATTTATGAACTGAGCAACCGTTTTAGCGGCGTG |
| | | CCGGATCGTTTTAGCGGCAGCGGCAGCCGTACCGATTTTACCCTGAAAATTAGCCGTGTGGAA |
| | | GCGGAAGATGTGGGCGTGTATTATTGCatgCAGTATATTGAAGCGCCGCTGACCTTTGGCGGC |
| | | GGCACCAAAGTGGAAATTAAACGTACGGTGGCGGCGCCCAGTGTATTCATCTTCCCTCCCTCC |
| | | GACGAGCAGTTGAAGTCGGGGACCGCGTCAGTCGTGTGCCTGCTCAATAACTTTTACCCGCGA |
| | | GAGGCTAAGGTCCAGTGGAAAGTGGATAATGCGCTGCAAAGCGGAAACTCCCAAGAATCAGTG |
| | | ACGGAACAAGACTCAAAAGACTCGACGTATTCGCTCTCATCGACGCTCACGCTTTCAAAAGCA |
| | | GATTACGAGAAGCACAAGGTGTATGCATGTGAAGTGACACACCAGGGTTTGTCGTCGCCAGTC |
| | | ACCAAGTCATTCAACCGCGGAGAGTGC |
| 1476 | LC Ab40 | GATATTGTGatgACCCAGACCCCGCTGAGCCTGAGCGTGACCCCGGGCCAGCCGGCGAGCATT |
| | | AGCTGCCGTAGCAGCCGTAGCCTGCTGCATAGCGATGGCAAAACCTATGTGTATTGGTATGTG |
| | | CAGAAAAGCGGCCAGCCGCCGCAGCTGCTGATTTATGAACTGAGCAACCGTTTTAGCGGCGTG |
| | | CCGGATCGTTTTAGCGGCAGCGGCAGCCGTACCGATTTTACCCTGAAAATTAGCCGTGTGGAA |
| | | GCGGAAGATGTGGGCGTGTATTATTGCatgCAGTATATTGAAGCGCCGCTGACCTTTGGCGGC |
| | | GGCACCAAAGTGGAAATTAAACGTACGGTGGCGGCGCCCAGTGTATTCATCTTCCCTCCCTCC |
| | | GACGAGCAGTTGAAGTCGGGGACCGCGTCAGTCGTGTGCCTGCTCAATAACTTTTACCCGCGA |
| | | GAGGCTAAGGTCCAGTGGAAAGTGGATAATGCGCTGCAAAGCGGAAACTCCCAAGAATCAGTG |
| | | ACGGAACAAGACTCAAAAGACTCGACGTATTCGCTCTCATCGACGCTCACGCTTTCAAAAGCA |
| | | GATTACGAGAAGCACAAGGTGTATGCATGTGAAGTGACACACCAGGGTTTGTCGTCGCCAGTC |
| | | ACCAAGTCATTCAACCGCGGAGAGTGC |
| 1477 | LC Ab41 | GATATTGTGatgACCCAGACCCCGCTGAGCCTGAGCGTGACCCCGGGCCAGCCGGCGAGCATT |
| | | AGCTGCCGTAGCAGCCGTAGCCTGCTGCATAGCGATGGCAAAACCTATGTGTATTGGTATGTG |
| | | CAGAAAAGCGGCCAGCCGCCGCAGCTGCTGATTTATGAACTGAGCAACCGTTTTAGCGGCGTG |
| | | CCGGATCGTTTTAGCGGCAGCGGCAGCCGTACCGATTTTACCCTGAAAATTAGCCGTGTGGAA |
| | | GCGGAAGATGTGGGCGTGTATTATTGCatgCAGTATATTGAAGCGCCGCTGACCTTTGGCGGC |
| | | GGCACCAAAGTGGAAATTAAACGTACGGTGGCGGCGCCCAGTGTATTCATCTTCCCTCCCTCC |
| | | GACGAGCAGTTGAAGTCGGGGACCGCGTCAGTCGTGTGCCTGCTCAATAACTTTTACCCGCGA |
| | | GAGGCTAAGGTCCAGTGGAAAGTGGATAATGCGCTGCAAAGCGGAAACTCCCAAGAATCAGTG |
| | | ACGGAACAAGACTCAAAAGACTCGACGTATTCGCTCTCATCGACGCTCACGCTTTCAAAAGCA |
| | | GATTACGAGAAGCACAAGGTGTATGCATGTGAAGTGACACACCAGGGTTTGTCGTCGCCAGTC |
| | | ACCAAGTCATTCAACCGCGGAGAGTGC |
| 1478 | LC Ab42 | GATATTGTGatgACCCAGACCCCGCTGAGCCTGAGCGTGACCCCGGGCCAGCCGGCGAGCATT |
| | | AGCTGCCGTAGCAGCCGTAGCCTGCTGCATAGCGATGGCAAAACCTATGTGTATTGGTATGTG |
| | | CAGAAAAGCGGCCAGCCGCCGCAGCTGCTGATTTATGAACTGAGCAACCGTTTTAGCGGCGTG |
| | | CCGGATCGTTTTAGCGGCAGCGGCAGCCGTACCGATTTTACCCTGAAAATTAGCCGTGTGGAA |
| | | GCGGAAGATGTGGGCGTGTATTATTGCatgCAGTATATTGAAGCGCCGCTGACCTTTGGCGGC |
| | | GGCACCAAAGTGGAAATTAAACGTACGGTGGCGGCGCCCAGTGTATTCATCTTCCCTCCCTCC |
| | | GACGAGCAGTTGAAGTCGGGGACCGCGTCAGTCGTGTGCCTGCTCAATAACTTTTACCCGCGA |
| | | GAGGCTAAGGTCCAGTGGAAAGTGGATAATGCGCTGCAAAGCGGAAACTCCCAAGAATCAGTG |
| | | ACGGAACAAGACTCAAAAGACTCGACGTATTCGCTCTCATCGACGCTCACGCTTTCAAAAGCA |
| | | GATTACGAGAAGCACAAGGTGTATGCATGTGAAGTGACACACCAGGGTTTGTCGTCGCCAGTC |
| | | ACCAAGTCATTCAACCGCGGAGAGTGC |
| 1479 | LC Ab43 | GATATTGTGatgACCCAGACCCCGCTGAGCCTGAGCGTGACCCCGGGCCAGCCGGCGAGCATT |
| | | AGCTGCCGTAGCAGCCGTAGCCTGCTGCATAGCGATGGCAAAACCTATGTGTATTGGTATGTG |
| | | CAGAAAAGCGGCCAGCCGCCGCAGCTGCTGATTTATGAACTGAGCAACCGTTTTAGCGGCGTG |
| | | CCGGATCGTTTTAGCGGCAGCGGCAGCCGTACCGATTTTACCCTGAAAATTAGCCGTGTGGAA |
| | | GCGGAAGATGTGGGCGTGTATTATTGCatgCAGTATATTGAAGCGCCGCTGACCTTTGGCGGC |
| | | GGCACCAAAGTGGAAATTAAACGTACGGTGGCGGCGCCCAGTGTATTCATCTTCCCTCCCTCC |
| | | GACGAGCAGTTGAAGTCGGGGACCGCGTCAGTCGTGTGCCTGCTCAATAACTTTTACCCGCGA |
| | | GAGGCTAAGGTCCAGTGGAAAGTGGATAATGCGCTGCAAAGCGGAAACTCCCAAGAATCAGTG |
| | | ACGGAACAAGACTCAAAAGACTCGACGTATTCGCTCTCATCGACGCTCACGCTTTCAAAAGCA |
| | | GATTACGAGAAGCACAAGGTGTATGCATGTGAAGTGACACACCAGGGTTTGTCGTCGCCAGTC |
| | | ACCAAGTCATTCAACCGCGGAGAGTGC |
| 1480 | LC Ab44 | GATATTGTGatgACCCAGACCCCGCTGAGCCTGAGCGTGACCCCGGGCCAGCCGGCGAGCATT |
| | | AGCTGCCGTAGCAGCCGTAGCCTGCTGCATAGCGATGGCAAAACCTATGTGTATTGGTATGTG |
| | | CAGAAAAGCGGCCAGCCGCCGCAGCTGCTGATTTATGAACTGAGCAACCGTTTTAGCGGCGTG |
| | | CCGGATCGTTTTAGCGGCAGCGGCAGCCGTACCGATTTTACCCTGAAAATTAGCCGTGTGGAA |
| | | GCGGAAGATGTGGGCGTGTATTATTGCatgCAGTATATTGAAGCGCCGCTGACCTTTGGCGGC |
| | | GGCACCAAAGTGGAAATTAAACGTACGGTGGCGGCGCCCAGTGTATTCATCTTCCCTCCCTCC |
| | | GACGAGCAGTTGAAGTCGGGGACCGCGTCAGTCGTGTGCCTGCTCAATAACTTTTACCCGCGA |
| | | GAGGCTAAGGTCCAGTGGAAAGTGGATAATGCGCTGCAAAGCGGAAACTCCCAAGAATCAGTG |
| | | ACGGAACAAGACTCAAAAGACTCGACGTATTCGCTCTCATCGACGCTCACGCTTTCAAAAGCA |
| | | GATTACGAGAAGCACAAGGTGTATGCATGTGAAGTGACACACCAGGGTTTGTCGTCGCCAGTC |
| | | ACCAAGTCATTCAACCGCGGAGAGTGC |
| 1481 | LC Ab45 | GATATTGTGatgACCCAGACCCCGCTGAGCCTGAGCGTGACCCCGGGCCAGCCGGCGAGCATT |
| | | AGCTGCCGTAGCAGCCGTAGCCTGCTGCATAGCGATGGCAAAACCTATGTGTATTGGTATGTG |
| | | CAGAAAAGCGGCCAGCCGCCGCAGCTGCTGATTTATGAACTGAGCAACCGTTTTAGCGGCGTG |
| | | CCGGATCGTTTTAGCGGCAGCGGCAGCCGTACCGATTTTACCCTGAAAATTAGCCGTGTGGAA |
| | | GCGGAAGATGTGGGCGTGTATTATTGCatgCAGTATATTGAAGCGCCGCTGACCTTTGGCGGC |
| | | GGCACCAAAGTGGAAATTAAACGTACGGTGGCGGCGCCCAGTGTATTCATCTTCCCTCCCTCC |
| | | GACGAGCAGTTGAAGTCGGGGACCGCGTCAGTCGTGTGCCTGCTCAATAACTTTTACCCGCGA |
| | | GAGGCTAAGGTCCAGTGGAAAGTGGATAATGCGCTGCAAAGCGGAAACTCCCAAGAATCAGTG |
| | | ACGGAACAAGACTCAAAAGACTCGACGTATTCGCTCTCATCGACGCTCACGCTTTCAAAAGCA |
| | | GATTACGAGAAGCACAAGGTGTATGCATGTGAAGTGACACACCAGGGTTTGTCGTCGCCAGTC |
| | | ACCAAGTCATTCAACCGCGGAGAGTGC |
| 1482 | LC Ab46 | GATATTGTGatgACCCAGACCCCGCTGAGCCTGAGCGTGACCCCGGGCCAGCCGGCGAGCATT |
| | | AGCTGCCGTAGCAGCCGTAGCCTGCTGCATAGCGATGGCAAAACCTATGTGTATTGGTATGTG |
| | | CAGAAAAGCGGCCAGCCGCCGCAGCTGCTGATTTATGAACTGAGCAACCGTTTTAGCGGCGTG |
| | | CCGGATCGTTTTAGCGGCAGCGGCAGCCGTACCGATTTTACCCTGAAAATTAGCCGTGTGGAA |
| | | GCGGAAGATGTGGGCGTGTATTATTGCatgCAGTATATTGAAGCGCCGCTGACCTTTGGCGGC |
| | | GGCACCAAAGTGGAAATTAAACGTACGGTGGCGGCGCCCAGTGTATTCATCTTCCCTCCCTCC |
| | | GACGAGCAGTTGAAGTCGGGGACCGCGTCAGTCGTGTGCCTGCTCAATAACTTTTACCCGCGA |
| | | GAGGCTAAGGTCCAGTGGAAAGTGGATAATGCGCTGCAAAGCGGAAACTCCCAAGAATCAGTG |
| | | ACGGAACAAGACTCAAAAGACTCGACGTATTCGCTCTCATCGACGCTCACGCTTTCAAAAGCA |
| | | GATTACGAGAAGCACAAGGTGTATGCATGTGAAGTGACACACCAGGGTTTGTCGTCGCCAGTC |
| | | ACCAAGTCATTCAACCGCGGAGAGTGC |
| 1483 | LC Ab47 | GATATTGTGatgACCCAGACCCCGCTGAGCCTGAGCGTGACCCCGGGCCAGCCGGCGAGCATT |
| | | AGCTGCCGTAGCAGCCGTAGCCTGCTGCATAGCGATGGCAAAACCTATGTGTATTGGTATGTG |
| | | CAGAAAAGCGGCCAGCCGCCGCAGCTGCTGATTTATGAACTGAGCAACCGTTTTAGCGGCGTG |
| | | CCGGATCGTTTTAGCGGCAGCGGCAGCCGTACCGATTTTACCCTGAAAATTAGCCGTGTGGAA |
| | | GCGGAAGATGTGGGCGTGTATTATTGCatgCAGTATATTGAAGCGCCGCTGACCTTTGGCGGC |
| | | GGCACCAAAGTGGAAATTAAACGTACGGTGGCGGCGCCCAGTGTATTCATCTTCCCTCCCTCC |
| | | GACGAGCAGTTGAAGTCGGGGACCGCGTCAGTCGTGTGCCTGCTCAATAACTTTTACCCGCGA |
| | | GAGGCTAAGGTCCAGTGGAAAGTGGATAATGCGCTGCAAAGCGGAAACTCCCAAGAATCAGTG |
| | | ACGGAACAAGACTCAAAAGACTCGACGTATTCGCTCTCATCGACGCTCACGCTTTCAAAAGCA |
| | | GATTACGAGAAGCACAAGGTGTATGCATGTGAAGTGACACACCAGGGTTTGTCGTCGCCAGTC |
| | | ACCAAGTCATTCAACCGCGGAGAGTGC |
| 1484 | LC Ab48 | GATATTGTGatgACCCAGACCCCGCTGAGCCTGAGCGTGACCCCGGGCCAGCCGGCGAGCATT |
| | | AGCTGCCGTAGCAGCCGTAGCCTGCTGCATAGCGATGGCAAAACCTATGTGTATTGGTATGTG |
| | | CAGAAAAGCGGCCAGCCGCCGCAGCTGCTGATTTATGAACTGAGCAACCGTTTTAGCGGCGTG |
| | | CCGGATCGTTTTAGCGGCAGCGGCAGCCGTACCGATTTTACCCTGAAAATTAGCCGTGTGGAA |
| | | GCGGAAGATGTGGGCGTGTATTATTGCatgCAGTATATTGAAGCGCCGCTGACCTTTGGCGGC |
| | | GGCACCAAAGTGGAAATTAAACGTACGGTGGCGGCGCCCAGTGTATTCATCTTCCCTCCCTCC |
| | | GACGAGCAGTTGAAGTCGGGGACCGCGTCAGTCGTGTGCCTGCTCAATAACTTTTACCCGCGA |
| | | GAGGCTAAGGTCCAGTGGAAAGTGGATAATGCGCTGCAAAGCGGAAACTCCCAAGAATCAGTG |
| | | ACGGAACAAGACTCAAAAGACTCGACGTATTCGCTCTCATCGACGCTCACGCTTTCAAAAGCA |
| | | GATTACGAGAAGCACAAGGTGTATGCATGTGAAGTGACACACCAGGGTTTGTCGTCGCCAGTC |
| | | ACCAAGTCATTCAACCGCGGAGAGTGC |
| 1485 | LC Ab49 | GATATTGTGatgACCCAGACCCCGCTGAGCCTGAGCGTGACCCCGGGCCAGCCGGCGAGCATT |
| | | AGCTGCCGTAGCAGCCGTAGCCTGCTGCATAGCGATGGCAAAACCTATGTGTATTGGTATGTG |
| | | CAGAAAAGCGGCCAGCCGCCGCAGCTGCTGATTTATGAACTGAGCAACCGTTTTAGCGGCGTG |
| | | CCGGATCGTTTTAGCGGCAGCGGCAGCCGTACCGATTTTACCCTGAAAATTAGCCGTGTGGAA |
| | | GCGGAAGATGTGGGCGTGTATTATTGCatgCAGTATATTGAAGCGCCGCTGACCTTTGGCGGC |
| | | GGCACCAAAGTGGAAATTAAACGTACGGTGGCGGCGCCCAGTGTATTCATCTTCCCTCCCTCC |
| | | GACGAGCAGTTGAAGTCGGGGACCGCGTCAGTCGTGTGCCTGCTCAATAACTTTTACCCGCGA |
| | | GAGGCTAAGGTCCAGTGGAAAGTGGATAATGCGCTGCAAAGCGGAAACTCCCAAGAATCAGTG |
| | | ACGGAACAAGACTCAAAAGACTCGACGTATTCGCTCTCATCGACGCTCACGCTTTCAAAAGCA |
| | | GATTACGAGAAGCACAAGGTGTATGCATGTGAAGTGACACACCAGGGTTTGTCGTCGCCAGTC |
| | | ACCAAGTCATTCAACCGCGGAGAGTGC |
| 1486 | LC Ab50 | GATATTGTGatgACCCAGACCCCGCTGAGCCTGAGCGTGACCCCGGGCCAGCCGGCGAGCATT |
| | | AGCTGCCGTAGCAGCCGTAGCCTGCTGCATAGCGATGGCAAAACCTATGTGTATTGGTATGTG |
| | | CAGAAAAGCGGCCAGCCGCCGCAGCTGCTGATTTATGAACTGAGCAACCGTTTTAGCGGCGTG |
| | | CCGGATCGTTTTAGCGGCAGCGGCAGCCGTACCGATTTTACCCTGAAAATTAGCCGTGTGGAA |
| | | GCGGAAGATGTGGGCGTGTATTATTGCatgCAGTATATTGAAGCGCCGCTGACCTTTGGCGGC |
| | | GGCACCAAAGTGGAAATTAAACGTACGGTGGCGGCGCCCAGTGTATTCATCTTCCCTCCCTCC |
| | | GACGAGCAGTTGAAGTCGGGGACCGCGTCAGTCGTGTGCCTGCTCAATAACTTTTACCCGCGA |
| | | GAGGCTAAGGTCCAGTGGAAAGTGGATAATGCGCTGCAAAGCGGAAACTCCCAAGAATCAGTG |
| | | ACGGAACAAGACTCAAAAGACTCGACGTATTCGCTCTCATCGACGCTCACGCTTTCAAAAGCA |
| | | GATTACGAGAAGCACAAGGTGTATGCATGTGAAGTGACACACCAGGGTTTGTCGTCGCCAGTC |
| | | ACCAAGTCATTCAACCGCGGAGAGTGC |
| 1487 | LC Ab51 | GATATTGTGatgACCCAGACCCCGCTGAGCCTGAGCGTGACCCCGGGCCAGCCGGCGAGCATT |
| | | AGCTGCCGTAGCAGCCGTAGCCTGCTGCATAGCGATGGCAAAACCTATGTGTATTGGTATGTG |
| | | CAGAAAAGCGGCCAGCCGCCGCAGCTGCTGATTTATGAACTGAGCAACCGTTTTAGCGGCGTG |
| | | CCGGATCGTTTTAGCGGCAGCGGCAGCCGTACCGATTTTACCCTGAAAATTAGCCGTGTGGAA |
| | | GCGGAAGATGTGGGCGTGTATTATTGCatgCAGTATATTGAAGCGCCGCTGACCTTTGGCGGC |
| | | GGCACCAAAGTGGAAATTAAACGTACGGTGGCGGCGCCCAGTGTATTCATCTTCCCTCCCTCC |
| | | GACGAGCAGTTGAAGTCGGGGACCGCGTCAGTCGTGTGCCTGCTCAATAACTTTTACCCGCGA |
| | | GAGGCTAAGGTCCAGTGGAAAGTGGATAATGCGCTGCAAAGCGGAAACTCCCAAGAATCAGTG |
| | | ACGGAACAAGACTCAAAAGACTCGACGTATTCGCTCTCATCGACGCTCACGCTTTCAAAAGCA |
| | | GATTACGAGAAGCACAAGGTGTATGCATGTGAAGTGACACACCAGGGTTTGTCGTCGCCAGTC |
| | | ACCAAGTCATTCAACCGCGGAGAGTGC |
| 1488 | LC Ab52 | GATATTGTGatgACCCAGACCCCGCTGAGCCTGAGCGTGACCCCGGGCCAGCCGGCGAGCATT |
| | | AGCTGCCGTAGCAGCCGTAGCCTGCTGCATAGCGATGGCAAAACCTATGTGTATTGGTATGTG |
| | | CAGAAAAGCGGCCAGCCGCCGCAGCTGCTGATTTATGAACTGAGCAACCGTTTTAGCGGCGTG |
| | | CCGGATCGTTTTAGCGGCAGCGGCAGCCGTACCGATTTTACCCTGAAAATTAGCCGTGTGGAA |
| | | GCGGAAGATGTGGGCGTGTATTATTGCatgCAGTATATTGAAGCGCCGCTGACCTTTGGCGGC |
| | | GGCACCAAAGTGGAAATTAAACGTACGGTGGCGGCGCCCAGTGTATTCATCTTCCCTCCCTCC |
| | | GACGAGCAGTTGAAGTCGGGGACCGCGTCAGTCGTGTGCCTGCTCAATAACTTTTACCCGCGA |
| | | GAGGCTAAGGTCCAGTGGAAAGTGGATAATGCGCTGCAAAGCGGAAACTCCCAAGAATCAGTG |
| | | ACGGAACAAGACTCAAAAGACTCGACGTATTCGCTCTCATCGACGCTCACGCTTTCAAAAGCA |
| | | GATTACGAGAAGCACAAGGTGTATGCATGTGAAGTGACACACCAGGGTTTGTCGTCGCCAGTC |
| | | ACCAAGTCATTCAACCGCGGAGAGTGC |
| 1489 | LC Ab53 | GATATTGTGatgACCCAGACCCCGCTGAGCCTGAGCGTGACCCCGGGCCAGCCGGCGAGCATT |
| | | AGCTGCCGTAGCAGCCGTAGCCTGCTGCATAGCGATGGCAAAACCTATGTGTATTGGTATGTG |
| | | CAGAAAAGCGGCCAGCCGCCGCAGCTGCTGATTTATGAACTGAGCAACCGTTTTAGCGGCGTG |
| | | CCGGATCGTTTTAGCGGCAGCGGCAGCCGTACCGATTTTACCCTGAAAATTAGCCGTGTGGAA |
| | | GCGGAAGATGTGGGCGTGTATTATTGCatgCAGTATATTGAAGCGCCGCTGACCTTTGGCGGC |
| | | GGCACCAAAGTGGAAATTAAACGTACGGTGGCGGCGCCCAGTGTATTCATCTTCCCTCCCTCC |
| | | GACGAGCAGTTGAAGTCGGGGACCGCGTCAGTCGTGTGCCTGCTCAATAACTTTTACCCGCGA |
| | | GAGGCTAAGGTCCAGTGGAAAGTGGATAATGCGCTGCAAAGCGGAAACTCCCAAGAATCAGTG |
| | | ACGGAACAAGACTCAAAAGACTCGACGTATTCGCTCTCATCGACGCTCACGCTTTCAAAAGCA |
| | | GATTACGAGAAGCACAAGGTGTATGCATGTGAAGTGACACACCAGGGTTTGTCGTCGCCAGTC |
| | | ACCAAGTCATTCAACCGCGGAGAGTGC |
| 1490 | LC Ab54 | GATATTGTGatgACCCAGACCCCGCTGAGCCTGAGCGTGACCCCGGGCCAGCCGGCGAGCATT |
| | | AGCTGCACCAGCAGCCGTAGCCTGCTGCATAGCGATGGCAAAACCTATGTGTATTGGTATGTG |
| | | CAGAAAAGCGGCCAGCCGCCGCAGCTGCTGATTTATGAACTGAGCAACCGTTTTAGCGGCGTG |
| | | CCGGATCGTTTTAGCGGCAGCGGCAGCCGTACCGATTTTACCCTGAAAATTAGCCGTGTGGAA |
| | | GCGGAAGATGTGGGCGTGTATTATTGCatgCAGTATATTGAAGCGCCGCTGACCTTTGGCGGC |
| | | GGCACCAAAGTGGAAATTAAACGTACGGTGGCGGCGCCCAGTGTATTCATCTTCCCTCCCTCC |
| | | GACGAGCAGTTGAAGTCGGGGACCGCGTCAGTCGTGTGCCTGCTCAATAACTTTTACCCGCGA |
| | | GAGGCTAAGGTCCAGTGGAAAGTGGATAATGCGCTGCAAAGCGGAAACTCCCAAGAATCAGTG |
| | | ACGGAACAAGACTCAAAAGACTCGACGTATTCGCTCTCATCGACGCTCACGCTTTCAAAAGCA |
| | | GATTACGAGAAGCACAAGGTGTATGCATGTGAAGTGACACACCAGGGTTTGTCGTCGCCAGTC |
| | | ACCAAGTCATTCAACCGCGGAGAGTGC |
| 1491 | LC Ab55 | GATATTGTGatgACCCAGACCCCGCTGAGCCTGAGCGTGACCCCGGGCCAGCCGGCGAGCATT |
| | | AGCTGCACCAGCAGCCGTAGCCTGCTGCATAGCGATGGCAAAACCTATGTGTATTGGTATGTG |
| | | CAGAAAAGCGGCCAGCCGCCGCAGCTGCTGATTTATGAACTGAGCAACCGTTTTAGCGGCGTG |
| | | CCGGATCGTTTTAGCGGCAGCGGCAGCCGTACCGATTTTACCCTGAAAATTAGCCGTGTGGAA |
| | | GCGGAAGATGTGGGCGTGTATTATTGCatgCAGTATATTGAAGCGCCGCTGACCTTTGGCGGC |
| | | GGCACCAAAGTGGAAATTAAACGTACGGTGGCGGCGCCCAGTGTATTCATCTTCCCTCCCTCC |
| | | GACGAGCAGTTGAAGTCGGGGACCGCGTCAGTCGTGTGCCTGCTCAATAACTTTTACCCGCGA |
| | | GAGGCTAAGGTCCAGTGGAAAGTGGATAATGCGCTGCAAAGCGGAAACTCCCAAGAATCAGTG |
| | | ACGGAACAAGACTCAAAAGACTCGACGTATTCGCTCTCATCGACGCTCACGCTTTCAAAAGCA |
| | | GATTACGAGAAGCACAAGGTGTATGCATGTGAAGTGACACACCAGGGTTTGTCGTCGCCAGTC |
| | | ACCAAGTCATTCAACCGCGGAGAGTGC |
| 1492 | LC Ab56 | GATATTGTGatgACCCAGACCCCGCTGAGCCTGAGCGTGACCCCGGGCCAGCCGGCGAGCATT |
| | | AGCTGCACCAGCAGCCGTAGCCTGCTGCATAGCGATGGCAAAACCTATGTGTATTGGTATGTG |
| | | CAGAAAAGCGGCCAGCCGCCGCAGCTGCTGATTTATGAACTGAGCAACCGTTTTAGCGGCGTG |
| | | CCGGATCGTTTTAGCGGCAGCGGCAGCCGTACCGATTTTACCCTGAAAATTAGCCGTGTGGAA |
| | | GCGGAAGATGTGGGCGTGTATTATTGCatgCAGTATATTGAAGCGCCGCTGACCTTTGGCGGC |
| | | GGCACCAAAGTGGAAATTAAACGTACGGTGGCGGCGCCCAGTGTATTCATCTTCCCTCCCTCC |
| | | GACGAGCAGTTGAAGTCGGGGACCGCGTCAGTCGTGTGCCTGCTCAATAACTTTTACCCGCGA |
| | | GAGGCTAAGGTCCAGTGGAAAGTGGATAATGCGCTGCAAAGCGGAAACTCCCAAGAATCAGTG |
| | | ACGGAACAAGACTCAAAAGACTCGACGTATTCGCTCTCATCGACGCTCACGCTTTCAAAAGCA |
| | | GATTACGAGAAGCACAAGGTGTATGCATGTGAAGTGACACACCAGGGTTTGTCGTCGCCAGTC |
| | | ACCAAGTCATTCAACCGCGGAGAGTGC |
| 1493 | LC Ab57 | GATATTGTGatgACCCAGACCCCGCTGAGCCTGAGCGTGACCCCGGGCCAGCCGGCGAGCATT |
| | | AGCTGCACCAGCAGCCGTAGCCTGCTGCATAGCGATGGCAAAACCTATGTGTATTGGTATGTG |
| | | CAGAAAAGCGGCCAGCCGCCGCAGCTGCTGATTTATGAACTGAGCAACCGTTTTAGCGGCGTG |
| | | CCGGATCGTTTTAGCGGCAGCGGCAGCCGTACCGATTTTACCCTGAAAATTAGCCGTGTGGAA |
| | | GCGGAAGATGTGGGCGTGTATTATTGCatgCAGTATATTGAAGCGCCGCTGACCTTTGGCGGC |
| | | GGCACCAAAGTGGAAATTAAACGTACGGTGGCGGCGCCCAGTGTATTCATCTTCCCTCCCTCC |
| | | GACGAGCAGTTGAAGTCGGGGACCGCGTCAGTCGTGTGCCTGCTCAATAACTTTTACCCGCGA |
| | | GAGGCTAAGGTCCAGTGGAAAGTGGATAATGCGCTGCAAAGCGGAAACTCCCAAGAATCAGTG |
| | | ACGGAACAAGACTCAAAAGACTCGACGTATTCGCTCTCATCGACGCTCACGCTTTCAAAAGCA |
| | | GATTACGAGAAGCACAAGGTGTATGCATGTGAAGTGACACACCAGGGTTTGTCGTCGCCAGTC |
| | | ACCAAGTCATTCAACCGCGGAGAGTGC |
| 1494 | LC Ab58 | GATATTGTGatgACCCAGACCCCGCTGAGCCTGAGCGTGACCCCGGGCCAGCCGGCGAGCATT |
| | | AGCTGCACCAGCAGCCGTAGCCTGCTGCATAGCGATGGCAAAACCTATGTGTATTGGTATGTG |
| | | CAGAAAAGCGGCCAGCCGCCGCAGCTGCTGATTTATGAACTGAGCAACCGTTTTAGCGGCGTG |
| | | CCGGATCGTTTTAGCGGCAGCGGCAGCCGTACCGATTTTACCCTGAAAATTAGCCGTGTGGAA |
| | | GCGGAAGATGTGGGCGTGTATTATTGCatgCAGTATATTGAAGCGCCGCTGACCTTTGGCGGC |
| | | GGCACCAAAGTGGAAATTAAACGTACGGTGGCGGCGCCCAGTGTATTCATCTTCCCTCCCTCC |
| | | GACGAGCAGTTGAAGTCGGGGACCGCGTCAGTCGTGTGCCTGCTCAATAACTTTTACCCGCGA |
| | | GAGGCTAAGGTCCAGTGGAAAGTGGATAATGCGCTGCAAAGCGGAAACTCCCAAGAATCAGTG |
| | | ACGGAACAAGACTCAAAAGACTCGACGTATTCGCTCTCATCGACGCTCACGCTTTCAAAAGCA |
| | | GATTACGAGAAGCACAAGGTGTATGCATGTGAAGTGACACACCAGGGTTTGTCGTCGCCAGTC |
| | | ACCAAGTCATTCAACCGCGGAGAGTGC |
| 1495 | LC Ab59 | GATATTGTGatgACCCAGACCCCGCTGAGCCTGAGCGTGACCCCGGGCCAGCCGGCGAGCATT |
| | | AGCTGCACCAGCAGCCGTAGCCTGCTGCATAGCGATGGCAAAACCTATGTGTATTGGTATGTG |
| | | CAGAAAAGCGGCCAGCCGCCGCAGCTGCTGATTTATGAACTGAGCAACCGTTTTAGCGGCGTG |
| | | CCGGATCGTTTTAGCGGCAGCGGCAGCCGTACCGATTTTACCCTGAAAATTAGCCGTGTGGAA |
| | | GCGGAAGATGTGGGCGTGTATTATTGCatgCAGTATATTGAAGCGCCGCTGACCTTTGGCGGC |
| | | GGCACCAAAGTGGAAATTAAACGTACGGTGGCGGCGCCCAGTGTATTCATCTTCCCTCCCTCC |
| | | GACGAGCAGTTGAAGTCGGGGACCGCGTCAGTCGTGTGCCTGCTCAATAACTTTTACCCGCGA |
| | | GAGGCTAAGGTCCAGTGGAAAGTGGATAATGCGCTGCAAAGCGGAAACTCCCAAGAATCAGTG |
| | | ACGGAACAAGACTCAAAAGACTCGACGTATTCGCTCTCATCGACGCTCACGCTTTCAAAAGCA |
| | | GATTACGAGAAGCACAAGGTGTATGCATGTGAAGTGACACACCAGGGTTTGTCGTCGCCAGTC |
| | | ACCAAGTCATTCAACCGCGGAGAGTGC |
| 1496 | LC Ab60 | GATATTGTGatgACCCAGACCCCGCTGAGCCTGAGCGTGACCCCGGGCCAGCCGGCGAGCATT |
| | | AGCTGCACCAGCAGCCGTAGCCTGCTGCATAGCGATGGCAAAACCTATGTGTATTGGTATGTG |
| | | CAGAAAAGCGGCCAGCCGCCGCAGCTGCTGATTTATGAACTGAGCAACCGTTTTAGCGGCGTG |
| | | CCGGATCGTTTTAGCGGCAGCGGCAGCCGTACCGATTTTACCCTGAAAATTAGCCGTGTGGAA |
| | | GCGGAAGATGTGGGCGTGTATTATTGCatgCAGTATATTGAAGCGCCGCTGACCTTTGGCGGC |
| | | GGCACCAAAGTGGAAATTAAACGTACGGTGGCGGCGCCCAGTGTATTCATCTTCCCTCCCTCC |
| | | GACGAGCAGTTGAAGTCGGGGACCGCGTCAGTCGTGTGCCTGCTCAATAACTTTTACCCGCGA |
| | | GAGGCTAAGGTCCAGTGGAAAGTGGATAATGCGCTGCAAAGCGGAAACTCCCAAGAATCAGTG |
| | | ACGGAACAAGACTCAAAAGACTCGACGTATTCGCTCTCATCGACGCTCACGCTTTCAAAAGCA |
| | | GATTACGAGAAGCACAAGGTGTATGCATGTGAAGTGACACACCAGGGTTTGTCGTCGCCAGTC |
| | | ACCAAGTCATTCAACCGCGGAGAGTGC |
| 1497 | LC Ab61 | GATATTGTGatgACCCAGACCCCGCTGAGCCTGAGCGTGACCCCGGGCCAGCCGGCGAGCATT |
| | | AGCTGCACCAGCAGCCGTAGCCTGCTGCATAGCGATGGCAAAACCTATGTGTATTGGTATGTG |
| | | CAGAAAAGCGGCCAGCCGCCGCAGCTGCTGATTTATGAACTGAGCAACCGTTTTAGCGGCGTG |
| | | CCGGATCGTTTTAGCGGCAGCGGCAGCCGTACCGATTTTACCCTGAAAATTAGCCGTGTGGAA |
| | | GCGGAAGATGTGGGCGTGTATTATTGCatgCAGTATATTGAAGCGCCGCTGACCTTTGGCGGC |
| | | GGCACCAAAGTGGAAATTAAACGTACGGTGGCGGCGCCCAGTGTATTCATCTTCCCTCCCTCC |
| | | GACGAGCAGTTGAAGTCGGGGACCGCGTCAGTCGTGTGCCTGCTCAATAACTTTTACCCGCGA |
| | | GAGGCTAAGGTCCAGTGGAAAGTGGATAATGCGCTGCAAAGCGGAAACTCCCAAGAATCAGTG |
| | | ACGGAACAAGACTCAAAAGACTCGACGTATTCGCTCTCATCGACGCTCACGCTTTCAAAAGCA |
| | | GATTACGAGAAGCACAAGGTGTATGCATGTGAAGTGACACACCAGGGTTTGTCGTCGCCAGTC |
| | | ACCAAGTCATTCAACCGCGGAGAGTGC |
| 1498 | LC Ab62 | GATATTGTGatgACCCAGACCCCGCTGAGCCTGAGCGTGACCCCGGGCCAGCCGGCGAGCATT |
| | | AGCTGCACCAGCAGCCGTAGCCTGCTGCATAGCGATGGCAAAACCTATGTGTATTGGTATGTG |
| | | CAGAAAAGCGGCCAGCCGCCGCAGCTGCTGATTTATGAACTGAGCAACCGTTTTAGCGGCGTG |
| | | CCGGATCGTTTTAGCGGCAGCGGCAGCCGTACCGATTTTACCCTGAAAATTAGCCGTGTGGAA |
| | | GCGGAAGATGTGGGCGTGTATTATTGCatgCAGTATATTGAAGCGCCGCTGACCTTTGGCGGC |
| | | GGCACCAAAGTGGAAATTAAACGTACGGTGGCGGCGCCCAGTGTATTCATCTTCCCTCCCTCC |
| | | GACGAGCAGTTGAAGTCGGGGACCGCGTCAGTCGTGTGCCTGCTCAATAACTTTTACCCGCGA |
| | | GAGGCTAAGGTCCAGTGGAAAGTGGATAATGCGCTGCAAAGCGGAAACTCCCAAGAATCAGTG |
| | | ACGGAACAAGACTCAAAAGACTCGACGTATTCGCTCTCATCGACGCTCACGCTTTCAAAAGCA |
| | | GATTACGAGAAGCACAAGGTGTATGCATGTGAAGTGACACACCAGGGTTTGTCGTCGCCAGTC |
| | | ACCAAGTCATTCAACCGCGGAGAGTGC |
| 1499 | LC Ab63 | GATATTGTGatgACCCAGACCCCGCTGAGCCTGAGCGTGACCCCGGGCCAGCCGGCGAGCATT |
| | | AGCTGCACCAGCAGCCGTAGCCTGCTGCATAGCGATGGCAAAACCTATGTGTATTGGTATGTG |
| | | CAGAAAAGCGGCCAGCCGCCGCAGCTGCTGATTTATGAACTGAGCAACCGTTTTAGCGGCGTG |
| | | CCGGATCGTTTTAGCGGCAGCGGCAGCCGTACCGATTTTACCCTGAAAATTAGCCGTGTGGAA |
| | | GCGGAAGATGTGGGCGTGTATTATTGCatgCAGTATATTGAAGCGCCGCTGACCTTTGGCGGC |
| | | GGCACCAAAGTGGAAATTAAACGTACGGTGGCGGCGCCCAGTGTATTCATCTTCCCTCCCTCC |
| | | GACGAGCAGTTGAAGTCGGGGACCGCGTCAGTCGTGTGCCTGCTCAATAACTTTTACCCGCGA |
| | | GAGGCTAAGGTCCAGTGGAAAGTGGATAATGCGCTGCAAAGCGGAAACTCCCAAGAATCAGTG |
| | | ACGGAACAAGACTCAAAAGACTCGACGTATTCGCTCTCATCGACGCTCACGCTTTCAAAAGCA |
| | | GATTACGAGAAGCACAAGGTGTATGCATGTGAAGTGACACACCAGGGTTTGTCGTCGCCAGTC |
| | | ACCAAGTCATTCAACCGCGGAGAGTGC |
| 1500 | LC Ab64 | GATATTGTGatgACCCAGACCCCGCTGAGCCTGAGCGTGACCCCGGGCCAGCCGGCGAGCATT |
| | | AGCTGCACCAGCAGCCGTAGCCTGCTGCATAGCGATGGCAAAACCTATGTGTATTGGTATGTG |
| | | CAGAAAAGCGGCCAGCCGCCGCAGCTGCTGATTTATGAACTGAGCAACCGTTTTAGCGGCGTG |
| | | CCGGATCGTTTTAGCGGCAGCGGCAGCCGTACCGATTTTACCCTGAAAATTAGCCGTGTGGAA |
| | | GCGGAAGATGTGGGCGTGTATTATTGCatgCAGTATATTGAAGCGCCGCTGACCTTTGGCGGC |
| | | GGCACCAAAGTGGAAATTAAACGTACGGTGGCGGCGCCCAGTGTATTCATCTTCCCTCCCTCC |
| | | GACGAGCAGTTGAAGTCGGGGACCGCGTCAGTCGTGTGCCTGCTCAATAACTTTTACCCGCGA |
| | | GAGGCTAAGGTCCAGTGGAAAGTGGATAATGCGCTGCAAAGCGGAAACTCCCAAGAATCAGTG |
| | | ACGGAACAAGACTCAAAAGACTCGACGTATTCGCTCTCATCGACGCTCACGCTTTCAAAAGCA |
| | | GATTACGAGAAGCACAAGGTGTATGCATGTGAAGTGACACACCAGGGTTTGTCGTCGCCAGTC |
| | | ACCAAGTCATTCAACCGCGGAGAGTGC |
| 1501 | LC Ab65 | GATATTGTGatgACCCAGACCCCGCTGAGCCTGAGCGTGACCCCGGGCCAGCCGGCGAGCATT |
| | | AGCTGCACCAGCAGCCGTAGCCTGCTGCATAGCGATGGCAAAACCTATGTGTATTGGTATGTG |
| | | CAGAAAAGCGGCCAGCCGCCGCAGCTGCTGATTTATGAACTGAGCAACCGTTTTAGCGGCGTG |
| | | CCGGATCGTTTTAGCGGCAGCGGCAGCCGTACCGATTTTACCCTGAAAATTAGCCGTGTGGAA |
| | | GCGGAAGATGTGGGCGTGTATTATTGCatgCAGTATATTGAAGCGCCGCTGACCTTTGGCGGC |
| | | GGCACCAAAGTGGAAATTAAACGTACGGTGGCGGCGCCCAGTGTATTCATCTTCCCTCCCTCC |
| | | GACGAGCAGTTGAAGTCGGGGACCGCGTCAGTCGTGTGCCTGCTCAATAACTTTTACCCGCGA |
| | | GAGGCTAAGGTCCAGTGGAAAGTGGATAATGCGCTGCAAAGCGGAAACTCCCAAGAATCAGTG |
| | | ACGGAACAAGACTCAAAAGACTCGACGTATTCGCTCTCATCGACGCTCACGCTTTCAAAAGCA |
| | | GATTACGAGAAGCACAAGGTGTATGCATGTGAAGTGACACACCAGGGTTTGTCGTCGCCAGTC |
| | | ACCAAGTCATTCAACCGCGGAGAGTGC |
| 1502 | LC Ab66 | GATATTGTGatgACCCAGACCCCGCTGAGCCTGAGCGTGACCCCGGGCCAGCCGGCGAGCATT |
| | | AGCTGCACCAGCAGCCGTAGCCTGCTGCATAGCGATGGCAAAACCTATGTGTATTGGTATGTG |
| | | CAGAAAAGCGGCCAGCCGCCGCAGCTGCTGATTTATGAACTGAGCAACCGTTTTAGCGGCGTG |
| | | CCGGATCGTTTTAGCGGCAGCGGCAGCCGTACCGATTTTACCCTGAAAATTAGCCGTGTGGAA |
| | | GCGGAAGATGTGGGCGTGTATTATTGCatgCAGTATATTGAAGCGCCGCTGACCTTTGGCGGC |
| | | GGCACCAAAGTGGAAATTAAACGTACGGTGGCGGCGCCCAGTGTATTCATCTTCCCTCCCTCC |
| | | GACGAGCAGTTGAAGTCGGGGACCGCGTCAGTCGTGTGCCTGCTCAATAACTTTTACCCGCGA |
| | | GAGGCTAAGGTCCAGTGGAAAGTGGATAATGCGCTGCAAAGCGGAAACTCCCAAGAATCAGTG |
| | | ACGGAACAAGACTCAAAAGACTCGACGTATTCGCTCTCATCGACGCTCACGCTTTCAAAAGCA |
| | | GATTACGAGAAGCACAAGGTGTATGCATGTGAAGTGACACACCAGGGTTTGTCGTCGCCAGTC |
| | | ACCAAGTCATTCAACCGCGGAGAGTGC |
| 1503 | LC Ab67 | GATATTGTGatgACCCAGACCCCGCTGAGCCTGAGCGTGACCCCGGGCCAGCCGGCGAGCATT |
| | | AGCTGCACCAGCAGCCGTAGCCTGCTGCATAGCGATGGCAAAACCTATGTGTATTGGTATGTG |
| | | CAGAAAAGCGGCCAGCCGCCGCAGCTGCTGATTTATGAACTGAGCAACCGTTTTAGCGGCGTG |
| | | CCGGATCGTTTTAGCGGCAGCGGCAGCCGTACCGATTTTACCCTGAAAATTAGCCGTGTGGAA |
| | | GCGGAAGATGTGGGCGTGTATTATTGCatgCAGTATATTGAAGCGCCGCTGACCTTTGGCGGC |
| | | GGCACCAAAGTGGAAATTAAACGTACGGTGGCGGCGCCCAGTGTATTCATCTTCCCTCCCTCC |
| | | GACGAGCAGTTGAAGTCGGGGACCGCGTCAGTCGTGTGCCTGCTCAATAACTTTTACCCGCGA |
| | | GAGGCTAAGGTCCAGTGGAAAGTGGATAATGCGCTGCAAAGCGGAAACTCCCAAGAATCAGTG |
| | | ACGGAACAAGACTCAAAAGACTCGACGTATTCGCTCTCATCGACGCTCACGCTTTCAAAAGCA |
| | | GATTACGAGAAGCACAAGGTGTATGCATGTGAAGTGACACACCAGGGTTTGTCGTCGCCAGTC |
| | | ACCAAGTCATTCAACCGCGGAGAGTGC |
| 1504 | LC Ab68 | GATATTGTGatgACCCAGACCCCGCTGAGCCTGAGCGTGACCCCGGGCCAGCCGGCGAGCATT |
| | | AGCTGCACCAGCAGCCGTAGCCTGCTGCATAGCGATGGCAAAACCTATGTGTATTGGTATGTG |
| | | CAGAAAAGCGGCCAGCCGCCGCAGCTGCTGATTTATGAACTGAGCAACCGTTTTAGCGGCGTG |
| | | CCGGATCGTTTTAGCGGCAGCGGCAGCCGTACCGATTTTACCCTGAAAATTAGCCGTGTGGAA |
| | | GCGGAAGATGTGGGCGTGTATTATTGCatgCAGTATATTGAAGCGCCGCTGACCTTTGGCGGC |
| | | GGCACCAAAGTGGAAATTAAACGTACGGTGGCGGCGCCCAGTGTATTCATCTTCCCTCCCTCC |
| | | GACGAGCAGTTGAAGTCGGGGACCGCGTCAGTCGTGTGCCTGCTCAATAACTTTTACCCGCGA |
| | | GAGGCTAAGGTCCAGTGGAAAGTGGATAATGCGCTGCAAAGCGGAAACTCCCAAGAATCAGTG |
| | | ACGGAACAAGACTCAAAAGACTCGACGTATTCGCTCTCATCGACGCTCACGCTTTCAAAAGCA |
| | | GATTACGAGAAGCACAAGGTGTATGCATGTGAAGTGACACACCAGGGTTTGTCGTCGCCAGTC |
| | | ACCAAGTCATTCAACCGCGGAGAGTGC |
| 1505 | LC Ab69 | GATATTGTGatgACCCAGACCCCGCTGAGCCTGAGCGTGACCCCGGGCCAGCCGGCGAGCATT |
| | | AGCTGCACCAGCAGCCGTAGCCTGCTGCATAGCGATGGCAAAACCTATGTGTATTGGTATGTG |
| | | CAGAAAAGCGGCCAGCCGCCGCAGCTGCTGATTTATGAACTGAGCAACCGTTTTAGCGGCGTG |
| | | CCGGATCGTTTTAGCGGCAGCGGCAGCCGTACCGATTTTACCCTGAAAATTAGCCGTGTGGAA |
| | | GCGGAAGATGTGGGCGTGTATTATTGCatgCAGTATATTGAAGCGCCGCTGACCTTTGGCGGC |
| | | GGCACCAAAGTGGAAATTAAACGTACGGTGGCGGCGCCCAGTGTATTCATCTTCCCTCCCTCC |
| | | GACGAGCAGTTGAAGTCGGGGACCGCGTCAGTCGTGTGCCTGCTCAATAACTTTTACCCGCGA |
| | | GAGGCTAAGGTCCAGTGGAAAGTGGATAATGCGCTGCAAAGCGGAAACTCCCAAGAATCAGTG |
| | | ACGGAACAAGACTCAAAAGACTCGACGTATTCGCTCTCATCGACGCTCACGCTTTCAAAAGCA |
| | | GATTACGAGAAGCACAAGGTGTATGCATGTGAAGTGACACACCAGGGTTTGTCGTCGCCAGTC |
| | | ACCAAGTCATTCAACCGCGGAGAGTGC |
| 1506 | LC Ab70 | GATATTGTGatgACCCAGACCCCGCTGAGCCTGAGCGTGACCCCGGGCCAGCCGGCGAGCATT |
| | | AGCTGCAAAAGCAGCCGTAGCCTGCTGCATAGCGATGGCAAAACCTATGTGTATTGGTATGTG |
| | | CAGAAAAGCGGCCAGCCGCCGCAGCTGCTGATTTATGAACTGAGCAACCGTTTTAGCGGCGTG |
| | | CCGGATCGTTTTAGCGGCAGCGGCAGCCGTACCGATTTTACCCTGAAAATTAGCCGTGTGGAA |
| | | GCGGAAGATGTGGGCGTGTATTATTGCatgCAGTATATTGAAGCGCCGCTGACCTTTGGCGGC |
| | | GGCACCAAAGTGGAAATTAAACGTACGGTGGCGGCGCCCAGTGTATTCATCTTCCCTCCCTCC |
| | | GACGAGCAGTTGAAGTCGGGGACCGCGTCAGTCGTGTGCCTGCTCAATAACTTTTACCCGCGA |
| | | GAGGCTAAGGTCCAGTGGAAAGTGGATAATGCGCTGCAAAGCGGAAACTCCCAAGAATCAGTG |
| | | ACGGAACAAGACTCAAAAGACTCGACGTATTCGCTCTCATCGACGCTCACGCTTTCAAAAGCA |
| | | GATTACGAGAAGCACAAGGTGTATGCATGTGAAGTGACACACCAGGGTTTGTCGTCGCCAGTC |
| | | ACCAAGTCATTCAACCGCGGAGAGTGC |
| 1507 | LC Ab71 | GATATTGTGatgACCCAGACCCCGCTGAGCCTGAGCGTGACCCCGGGCCAGCCGGCGAGCATT |
| | | AGCTGCAAAAGCAGCCGTAGCCTGCTGCATAGCGATGGCAAAACCTATGTGTATTGGTATGTG |
| | | CAGAAAAGCGGCCAGCCGCCGCAGCTGCTGATTTATGAACTGAGCAACCGTTTTAGCGGCGTG |
| | | CCGGATCGTTTTAGCGGCAGCGGCAGCCGTACCGATTTTACCCTGAAAATTAGCCGTGTGGAA |
| | | GCGGAAGATGTGGGCGTGTATTATTGCatgCAGTATATTGAAGCGCCGCTGACCTTTGGCGGC |
| | | GGCACCAAAGTGGAAATTAAACGTACGGTGGCGGCGCCCAGTGTATTCATCTTCCCTCCCTCC |
| | | GACGAGCAGTTGAAGTCGGGGACCGCGTCAGTCGTGTGCCTGCTCAATAACTTTTACCCGCGA |
| | | GAGGCTAAGGTCCAGTGGAAAGTGGATAATGCGCTGCAAAGCGGAAACTCCCAAGAATCAGTG |
| | | ACGGAACAAGACTCAAAAGACTCGACGTATTCGCTCTCATCGACGCTCACGCTTTCAAAAGCA |
| | | GATTACGAGAAGCACAAGGTGTATGCATGTGAAGTGACACACCAGGGTTTGTCGTCGCCAGTC |
| | | ACCAAGTCATTCAACCGCGGAGAGTGC |
| 1508 | LC Ab72 | GATATTGTGatgACCCAGACCCCGCTGAGCCTGAGCGTGACCCCGGGCCAGCCGGCGAGCATT |
| | | AGCTGCAAAAGCAGCCGTAGCCTGCTGCATAGCGATGGCAAAACCTATGTGTATTGGTATGTG |
| | | CAGAAAAGCGGCCAGCCGCCGCAGCTGCTGATTTATGAACTGAGCAACCGTTTTAGCGGCGTG |
| | | CCGGATCGTTTTAGCGGCAGCGGCAGCCGTACCGATTTTACCCTGAAAATTAGCCGTGTGGAA |
| | | GCGGAAGATGTGGGCGTGTATTATTGCatgCAGTATATTGAAGCGCCGCTGACCTTTGGCGGC |
| | | GGCACCAAAGTGGAAATTAAACGTACGGTGGCGGCGCCCAGTGTATTCATCTTCCCTCCCTCC |
| | | GACGAGCAGTTGAAGTCGGGGACCGCGTCAGTCGTGTGCCTGCTCAATAACTTTTACCCGCGA |
| | | GAGGCTAAGGTCCAGTGGAAAGTGGATAATGCGCTGCAAAGCGGAAACTCCCAAGAATCAGTG |
| | | ACGGAACAAGACTCAAAAGACTCGACGTATTCGCTCTCATCGACGCTCACGCTTTCAAAAGCA |
| | | GATTACGAGAAGCACAAGGTGTATGCATGTGAAGTGACACACCAGGGTTTGTCGTCGCCAGTC |
| | | ACCAAGTCATTCAACCGCGGAGAGTGC |
| 1509 | LC Ab73 | GATATTGTGatgACCCAGACCCCGCTGAGCCTGAGCGTGACCCCGGGCCAGCCGGCGAGCATT |
| | | AGCTGCAAAAGCAGCCGTAGCCTGCTGCATAGCGATGGCAAAACCTATGTGTATTGGTATGTG |
| | | CAGAAAAGCGGCCAGCCGCCGCAGCTGCTGATTTATGAACTGAGCAACCGTTTTAGCGGCGTG |
| | | CCGGATCGTTTTAGCGGCAGCGGCAGCCGTACCGATTTTACCCTGAAAATTAGCCGTGTGGAA |
| | | GCGGAAGATGTGGGCGTGTATTATTGCatgCAGTATATTGAAGCGCCGCTGACCTTTGGCGGC |
| | | GGCACCAAAGTGGAAATTAAACGTACGGTGGCGGCGCCCAGTGTATTCATCTTCCCTCCCTCC |
| | | GACGAGCAGTTGAAGTCGGGGACCGCGTCAGTCGTGTGCCTGCTCAATAACTTTTACCCGCGA |
| | | GAGGCTAAGGTCCAGTGGAAAGTGGATAATGCGCTGCAAAGCGGAAACTCCCAAGAATCAGTG |
| | | ACGGAACAAGACTCAAAAGACTCGACGTATTCGCTCTCATCGACGCTCACGCTTTCAAAAGCA |
| | | GATTACGAGAAGCACAAGGTGTATGCATGTGAAGTGACACACCAGGGTTTGTCGTCGCCAGTC |
| | | ACCAAGTCATTCAACCGCGGAGAGTGC |
| 1510 | LC Ab74 | GATATTGTGatgACCCAGACCCCGCTGAGCCTGAGCGTGACCCCGGGCCAGCCGGCGAGCATT |
| | | AGCTGCAAAAGCAGCCGTAGCCTGCTGCATAGCGATGGCAAAACCTATGTGTATTGGTATGTG |
| | | CAGAAAAGCGGCCAGCCGCCGCAGCTGCTGATTTATGAACTGAGCAACCGTTTTAGCGGCGTG |
| | | CCGGATCGTTTTAGCGGCAGCGGCAGCCGTACCGATTTTACCCTGAAAATTAGCCGTGTGGAA |
| | | GCGGAAGATGTGGGCGTGTATTATTGCatgCAGTATATTGAAGCGCCGCTGACCTTTGGCGGC |
| | | GGCACCAAAGTGGAAATTAAACGTACGGTGGCGGCGCCCAGTGTATTCATCTTCCCTCCCTCC |
| | | GACGAGCAGTTGAAGTCGGGGACCGCGTCAGTCGTGTGCCTGCTCAATAACTTTTACCCGCGA |
| | | GAGGCTAAGGTCCAGTGGAAAGTGGATAATGCGCTGCAAAGCGGAAACTCCCAAGAATCAGTG |
| | | ACGGAACAAGACTCAAAAGACTCGACGTATTCGCTCTCATCGACGCTCACGCTTTCAAAAGCA |
| | | GATTACGAGAAGCACAAGGTGTATGCATGTGAAGTGACACACCAGGGTTTGTCGTCGCCAGTC |
| | | ACCAAGTCATTCAACCGCGGAGAGTGC |
| 1511 | LC Ab75 | GATATTGTGatgACCCAGACCCCGCTGAGCCTGAGCGTGACCCCGGGCCAGCCGGCGAGCATT |
| | | AGCTGCAAAAGCAGCCGTAGCCTGCTGCATAGCGATGGCAAAACCTATGTGTATTGGTATGTG |
| | | CAGAAAAGCGGCCAGCCGCCGCAGCTGCTGATTTATGAACTGAGCAACCGTTTTAGCGGCGTG |
| | | CCGGATCGTTTTAGCGGCAGCGGCAGCCGTACCGATTTTACCCTGAAAATTAGCCGTGTGGAA |
| | | GCGGAAGATGTGGGCGTGTATTATTGCatgCAGTATATTGAAGCGCCGCTGACCTTTGGCGGC |
| | | GGCACCAAAGTGGAAATTAAACGTACGGTGGCGGCGCCCAGTGTATTCATCTTCCCTCCCTCC |
| | | GACGAGCAGTTGAAGTCGGGGACCGCGTCAGTCGTGTGCCTGCTCAATAACTTTTACCCGCGA |
| | | GAGGCTAAGGTCCAGTGGAAAGTGGATAATGCGCTGCAAAGCGGAAACTCCCAAGAATCAGTG |
| | | ACGGAACAAGACTCAAAAGACTCGACGTATTCGCTCTCATCGACGCTCACGCTTTCAAAAGCA |
| | | GATTACGAGAAGCACAAGGTGTATGCATGTGAAGTGACACACCAGGGTTTGTCGTCGCCAGTC |
| | | ACCAAGTCATTCAACCGCGGAGAGTGC |
| 1512 | LC Ab76 | GATATTGTGatgACCCAGACCCCGCTGAGCCTGAGCGTGACCCCGGGCCAGCCGGCGAGCATT |
| | | AGCTGCAAAAGCAGCCGTAGCCTGCTGCATAGCGATGGCAAAACCTATGTGTATTGGTATGTG |
| | | CAGAAAAGCGGCCAGCCGCCGCAGCTGCTGATTTATGAACTGAGCAACCGTTTTAGCGGCGTG |
| | | CCGGATCGTTTTAGCGGCAGCGGCAGCCGTACCGATTTTACCCTGAAAATTAGCCGTGTGGAA |
| | | GCGGAAGATGTGGGCGTGTATTATTGCatgCAGTATATTGAAGCGCCGCTGACCTTTGGCGGC |
| | | GGCACCAAAGTGGAAATTAAACGTACGGTGGCGGCGCCCAGTGTATTCATCTTCCCTCCCTCC |
| | | GACGAGCAGTTGAAGTCGGGGACCGCGTCAGTCGTGTGCCTGCTCAATAACTTTTACCCGCGA |
| | | GAGGCTAAGGTCCAGTGGAAAGTGGATAATGCGCTGCAAAGCGGAAACTCCCAAGAATCAGTG |
| | | ACGGAACAAGACTCAAAAGACTCGACGTATTCGCTCTCATCGACGCTCACGCTTTCAAAAGCA |
| | | GATTACGAGAAGCACAAGGTGTATGCATGTGAAGTGACACACCAGGGTTTGTCGTCGCCAGTC |
| | | ACCAAGTCATTCAACCGCGGAGAGTGC |
| 1513 | LC Ab77 | GATATTGTGatgACCCAGACCCCGCTGAGCCTGAGCGTGACCCCGGGCCAGCCGGCGAGCATT |
| | | AGCTGCAAAAGCAGCCGTAGCCTGCTGCATAGCGATGGCAAAACCTATGTGTATTGGTATGTG |
| | | CAGAAAAGCGGCCAGCCGCCGCAGCTGCTGATTTATGAACTGAGCAACCGTTTTAGCGGCGTG |
| | | CCGGATCGTTTTAGCGGCAGCGGCAGCCGTACCGATTTTACCCTGAAAATTAGCCGTGTGGAA |
| | | GCGGAAGATGTGGGCGTGTATTATTGCatgCAGTATATTGAAGCGCCGCTGACCTTTGGCGGC |
| | | GGCACCAAAGTGGAAATTAAACGTACGGTGGCGGCGCCCAGTGTATTCATCTTCCCTCCCTCC |
| | | GACGAGCAGTTGAAGTCGGGGACCGCGTCAGTCGTGTGCCTGCTCAATAACTTTTACCCGCGA |
| | | GAGGCTAAGGTCCAGTGGAAAGTGGATAATGCGCTGCAAAGCGGAAACTCCCAAGAATCAGTG |
| | | ACGGAACAAGACTCAAAAGACTCGACGTATTCGCTCTCATCGACGCTCACGCTTTCAAAAGCA |
| | | GATTACGAGAAGCACAAGGTGTATGCATGTGAAGTGACACACCAGGGTTTGTCGTCGCCAGTC |
| | | ACCAAGTCATTCAACCGCGGAGAGTGC |
| 1514 | LC Ab78 | GATATTGTGatgACCCAGACCCCGCTGAGCCTGAGCGTGACCCCGGGCCAGCCGGCGAGCATT |
| | | AGCTGCAAAAGCAGCCGTAGCCTGCTGCATAGCGATGGCAAAACCTATGTGTATTGGTATGTG |
| | | CAGAAAAGCGGCCAGCCGCCGCAGCTGCTGATTTATGAACTGAGCAACCGTTTTAGCGGCGTG |
| | | CCGGATCGTTTTAGCGGCAGCGGCAGCCGTACCGATTTTACCCTGAAAATTAGCCGTGTGGAA |
| | | GCGGAAGATGTGGGCGTGTATTATTGCatgCAGTATATTGAAGCGCCGCTGACCTTTGGCGGC |
| | | GGCACCAAAGTGGAAATTAAACGTACGGTGGCGGCGCCCAGTGTATTCATCTTCCCTCCCTCC |
| | | GACGAGCAGTTGAAGTCGGGGACCGCGTCAGTCGTGTGCCTGCTCAATAACTTTTACCCGCGA |
| | | GAGGCTAAGGTCCAGTGGAAAGTGGATAATGCGCTGCAAAGCGGAAACTCCCAAGAATCAGTG |
| | | ACGGAACAAGACTCAAAAGACTCGACGTATTCGCTCTCATCGACGCTCACGCTTTCAAAAGCA |
| | | GATTACGAGAAGCACAAGGTGTATGCATGTGAAGTGACACACCAGGGTTTGTCGTCGCCAGTC |
| | | ACCAAGTCATTCAACCGCGGAGAGTGC |
| 1515 | LC Ab79 | GATATTGTGatgACCCAGACCCCGCTGAGCCTGAGCGTGACCCCGGGCCAGCCGGCGAGCATT |
| | | AGCTGCAAAAGCAGCCGTAGCCTGCTGCATAGCGATGGCAAAACCTATGTGTATTGGTATGTG |
| | | CAGAAAAGCGGCCAGCCGCCGCAGCTGCTGATTTATGAACTGAGCAACCGTTTTAGCGGCGTG |
| | | CCGGATCGTTTTAGCGGCAGCGGCAGCCGTACCGATTTTACCCTGAAAATTAGCCGTGTGGAA |
| | | GCGGAAGATGTGGGCGTGTATTATTGCatgCAGTATATTGAAGCGCCGCTGACCTTTGGCGGC |
| | | GGCACCAAAGTGGAAATTAAACGTACGGTGGCGGCGCCCAGTGTATTCATCTTCCCTCCCTCC |
| | | GACGAGCAGTTGAAGTCGGGGACCGCGTCAGTCGTGTGCCTGCTCAATAACTTTTACCCGCGA |
| | | GAGGCTAAGGTCCAGTGGAAAGTGGATAATGCGCTGCAAAGCGGAAACTCCCAAGAATCAGTG |
| | | ACGGAACAAGACTCAAAAGACTCGACGTATTCGCTCTCATCGACGCTCACGCTTTCAAAAGCA |
| | | GATTACGAGAAGCACAAGGTGTATGCATGTGAAGTGACACACCAGGGTTTGTCGTCGCCAGTC |
| | | ACCAAGTCATTCAACCGCGGAGAGTGC |
| 1516 | LC Ab80 | GATATTGTGatgACCCAGACCCCGCTGAGCCTGAGCGTGACCCCGGGCCAGCCGGCGAGCATT |
| | | AGCTGCAAAAGCAGCCGTAGCCTGCTGCATAGCGATGGCAAAACCTATGTGTATTGGTATGTG |
| | | CAGAAAAGCGGCCAGCCGCCGCAGCTGCTGATTTATGAACTGAGCAACCGTTTTAGCGGCGTG |
| | | CCGGATCGTTTTAGCGGCAGCGGCAGCCGTACCGATTTTACCCTGAAAATTAGCCGTGTGGAA |
| | | GCGGAAGATGTGGGCGTGTATTATTGCatgCAGTATATTGAAGCGCCGCTGACCTTTGGCGGC |
| | | GGCACCAAAGTGGAAATTAAACGTACGGTGGCGGCGCCCAGTGTATTCATCTTCCCTCCCTCC |
| | | GACGAGCAGTTGAAGTCGGGGACCGCGTCAGTCGTGTGCCTGCTCAATAACTTTTACCCGCGA |
| | | GAGGCTAAGGTCCAGTGGAAAGTGGATAATGCGCTGCAAAGCGGAAACTCCCAAGAATCAGTG |
| | | ACGGAACAAGACTCAAAAGACTCGACGTATTCGCTCTCATCGACGCTCACGCTTTCAAAAGCA |
| | | GATTACGAGAAGCACAAGGTGTATGCATGTGAAGTGACACACCAGGGTTTGTCGTCGCCAGTC |
| | | ACCAAGTCATTCAACCGCGGAGAGTGC |
| 1517 | LC Ab81 | GATATTGTGatgACCCAGACCCCGCTGAGCCTGAGCGTGACCCCGGGCCAGCCGGCGAGCATT |
| | | AGCTGCAAAAGCAGCCGTAGCCTGCTGCATAGCGATGGCAAAACCTATGTGTATTGGTATGTG |
| | | CAGAAAAGCGGCCAGCCGCCGCAGCTGCTGATTTATGAACTGAGCAACCGTTTTAGCGGCGTG |
| | | CCGGATCGTTTTAGCGGCAGCGGCAGCCGTACCGATTTTACCCTGAAAATTAGCCGTGTGGAA |
| | | GCGGAAGATGTGGGCGTGTATTATTGCatgCAGTATATTGAAGCGCCGCTGACCTTTGGCGGC |
| | | GGCACCAAAGTGGAAATTAAACGTACGGTGGCGGCGCCCAGTGTATTCATCTTCCCTCCCTCC |
| | | GACGAGCAGTTGAAGTCGGGGACCGCGTCAGTCGTGTGCCTGCTCAATAACTTTTACCCGCGA |
| | | GAGGCTAAGGTCCAGTGGAAAGTGGATAATGCGCTGCAAAGCGGAAACTCCCAAGAATCAGTG |
| | | ACGGAACAAGACTCAAAAGACTCGACGTATTCGCTCTCATCGACGCTCACGCTTTCAAAAGCA |
| | | GATTACGAGAAGCACAAGGTGTATGCATGTGAAGTGACACACCAGGGTTTGTCGTCGCCAGTC |
| | | ACCAAGTCATTCAACCGCGGAGAGTGC |
| 1518 | LC Ab82 | GATATTGTGatgACCCAGACCCCGCTGAGCCTGAGCGTGACCCCGGGCCAGCCGGCGAGCATT |
| | | AGCTGCAAAAGCAGCCGTAGCCTGCTGCATAGCGATGGCAAAACCTATGTGTATTGGTATGTG |
| | | CAGAAAAGCGGCCAGCCGCCGCAGCTGCTGATTTATGAACTGAGCAACCGTTTTAGCGGCGTG |
| | | CCGGATCGTTTTAGCGGCAGCGGCAGCCGTACCGATTTTACCCTGAAAATTAGCCGTGTGGAA |
| | | GCGGAAGATGTGGGCGTGTATTATTGCatgCAGTATATTGAAGCGCCGCTGACCTTTGGCGGC |
| | | GGCACCAAAGTGGAAATTAAACGTACGGTGGCGGCGCCCAGTGTATTCATCTTCCCTCCCTCC |
| | | GACGAGCAGTTGAAGTCGGGGACCGCGTCAGTCGTGTGCCTGCTCAATAACTTTTACCCGCGA |
| | | GAGGCTAAGGTCCAGTGGAAAGTGGATAATGCGCTGCAAAGCGGAAACTCCCAAGAATCAGTG |
| | | ACGGAACAAGACTCAAAAGACTCGACGTATTCGCTCTCATCGACGCTCACGCTTTCAAAAGCA |
| | | GATTACGAGAAGCACAAGGTGTATGCATGTGAAGTGACACACCAGGGTTTGTCGTCGCCAGTC |
| | | ACCAAGTCATTCAACCGCGGAGAGTGC |
| 1519 | LC Ab83 | GATATTGTGatgACCCAGACCCCGCTGAGCCTGAGCGTGACCCCGGGCCAGCCGGCGAGCATT |
| | | AGCTGCAAAAGCAGCCGTAGCCTGCTGCATAGCGATGGCAAAACCTATGTGTATTGGTATGTG |
| | | CAGAAAAGCGGCCAGCCGCCGCAGCTGCTGATTTATGAACTGAGCAACCGTTTTAGCGGCGTG |
| | | CCGGATCGTTTTAGCGGCAGCGGCAGCCGTACCGATTTTACCCTGAAAATTAGCCGTGTGGAA |
| | | GCGGAAGATGTGGGCGTGTATTATTGCatgCAGTATATTGAAGCGCCGCTGACCTTTGGCGGC |
| | | GGCACCAAAGTGGAAATTAAACGTACGGTGGCGGCGCCCAGTGTATTCATCTTCCCTCCCTCC |
| | | GACGAGCAGTTGAAGTCGGGGACCGCGTCAGTCGTGTGCCTGCTCAATAACTTTTACCCGCGA |
| | | GAGGCTAAGGTCCAGTGGAAAGTGGATAATGCGCTGCAAAGCGGAAACTCCCAAGAATCAGTG |
| | | ACGGAACAAGACTCAAAAGACTCGACGTATTCGCTCTCATCGACGCTCACGCTTTCAAAAGCA |
| | | GATTACGAGAAGCACAAGGTGTATGCATGTGAAGTGACACACCAGGGTTTGTCGTCGCCAGTC |
| | | ACCAAGTCATTCAACCGCGGAGAGTGC |
| 1520 | LC Ab84 | GATATTGTGatgACCCAGACCCCGCTGAGCCTGAGCGTGACCCCGGGCCAGCCGGCGAGCATT |
| | | AGCTGCAAAAGCAGCCGTAGCCTGCTGCATAGCGATGGCAAAACCTATGTGTATTGGTATGTG |
| | | CAGAAAAGCGGCCAGCCGCCGCAGCTGCTGATTTATGAACTGAGCAACCGTTTTAGCGGCGTG |
| | | CCGGATCGTTTTAGCGGCAGCGGCAGCCGTACCGATTTTACCCTGAAAATTAGCCGTGTGGAA |
| | | GCGGAAGATGTGGGCGTGTATTATTGCatgCAGTATATTGAAGCGCCGCTGACCTTTGGCGGC |
| | | GGCACCAAAGTGGAAATTAAACGTACGGTGGCGGCGCCCAGTGTATTCATCTTCCCTCCCTCC |
| | | GACGAGCAGTTGAAGTCGGGGACCGCGTCAGTCGTGTGCCTGCTCAATAACTTTTACCCGCGA |
| | | GAGGCTAAGGTCCAGTGGAAAGTGGATAATGCGCTGCAAAGCGGAAACTCCCAAGAATCAGTG |
| | | ACGGAACAAGACTCAAAAGACTCGACGTATTCGCTCTCATCGACGCTCACGCTTTCAAAAGCA |
| | | GATTACGAGAAGCACAAGGTGTATGCATGTGAAGTGACACACCAGGGTTTGTCGTCGCCAGTC |
| | | ACCAAGTCATTCAACCGCGGAGAGTGC |
| 1521 | LC Ab85 | GATATTGTGatgACCCAGACCCCGCTGAGCCTGAGCGTGACCCCGGGCCAGCCGGCGAGCATT |
| | | AGCTGCAAAAGCAGCCGTAGCCTGCTGCATAGCGATGGCAAAACCTATGTGTATTGGTATGTG |
| | | CAGAAAAGCGGCCAGCCGCCGCAGCTGCTGATTTATGAACTGAGCAACCGTTTTAGCGGCGTG |
| | | CCGGATCGTTTTAGCGGCAGCGGCAGCCGTACCGATTTTACCCTGAAAATTAGCCGTGTGGAA |
| | | GCGGAAGATGTGGGCGTGTATTATTGCatgCAGTATATTGAAGCGCCGCTGACCTTTGGCGGC |
| | | GGCACCAAAGTGGAAATTAAACGTACGGTGGCGGCGCCCAGTGTATTCATCTTCCCTCCCTCC |
| | | GACGAGCAGTTGAAGTCGGGGACCGCGTCAGTCGTGTGCCTGCTCAATAACTTTTACCCGCGA |
| | | GAGGCTAAGGTCCAGTGGAAAGTGGATAATGCGCTGCAAAGCGGAAACTCCCAAGAATCAGTG |
| | | ACGGAACAAGACTCAAAAGACTCGACGTATTCGCTCTCATCGACGCTCACGCTTTCAAAAGCA |
| | | GATTACGAGAAGCACAAGGTGTATGCATGTGAAGTGACACACCAGGGTTTGTCGTCGCCAGTC |
| | | ACCAAGTCATTCAACCGCGGAGAGTGC |
| 1522 | LC Ab86 | GATATTGTGatgACCCAGACCCCGCTGAGCCTGAGCGTGACCCCGGGCCAGCCGGCGAGCATT |
| | | AGCTGCAAAAGCAGCCGTAGCCTGCTGTGGAGCGATGGCAAAACCTATGTGTATTGGTATGTG |
| | | CAGAAAAGCGGCCAGCCGCCGCAGCTGCTGATTTATGAACTGAGCAACCGTTTTAGCGGCGTG |
| | | CCGGATCGTTTTAGCGGCAGCGGCAGCCGTACCGATTTTACCCTGAAAATTAGCCGTGTGGAA |
| | | GCGGAAGATGTGGGCGTGTATTATTGCatgCAGTATATTGAAGCGCCGCTGACCTTTGGCGGC |
| | | GGCACCAAAGTGGAAATTAAACGTACGGTGGCGGCGCCCAGTGTATTCATCTTCCCTCCCTCC |
| | | GACGAGCAGTTGAAGTCGGGGACCGCGTCAGTCGTGTGCCTGCTCAATAACTTTTACCCGCGA |
| | | GAGGCTAAGGTCCAGTGGAAAGTGGATAATGCGCTGCAAAGCGGAAACTCCCAAGAATCAGTG |
| | | ACGGAACAAGACTCAAAAGACTCGACGTATTCGCTCTCATCGACGCTCACGCTTTCAAAAGCA |
| | | GATTACGAGAAGCACAAGGTGTATGCATGTGAAGTGACACACCAGGGTTTGTCGTCGCCAGTC |
| | | ACCAAGTCATTCAACCGCGGAGAGTGC |
| 1523 | LC Ab87 | GATATTGTGatgACCCAGACCCCGCTGAGCCTGAGCGTGACCCCGGGCCAGCCGGCGAGCATT |
| | | AGCTGCAAAAGCAGCCGTAGCCTGCTGCATAGCGATGGCAAAACCTATGTGTATTGGTATGTG |
| | | CAGAAAAGCGGCCAGCCGCCGCAGCTGCTGATTTATGAACTGAGCAACCGTTTTAGCGGCGTG |
| | | CCGGATCGTTTTAGCGGCAGCGGCAGCCGTACCGATTTTACCCTGAAAATTAGCCGTGTGGAA |
| | | GCGGAAGATGTGGGCGTGTATTATTGCatgCAGTATGTGGAAGCGCCGCTGACCTTTGGCGGC |
| | | GGCACCAAAGTGGAAATTAAACGTACGGTGGCGGCGCCCAGTGTATTCATCTTCCCTCCCTCC |
| | | GACGAGCAGTTGAAGTCGGGGACCGCGTCAGTCGTGTGCCTGCTCAATAACTTTTACCCGCGA |
| | | GAGGCTAAGGTCCAGTGGAAAGTGGATAATGCGCTGCAAAGCGGAAACTCCCAAGAATCAGTG |
| | | ACGGAACAAGACTCAAAAGACTCGACGTATTCGCTCTCATCGACGCTCACGCTTTCAAAAGCA |
| | | GATTACGAGAAGCACAAGGTGTATGCATGTGAAGTGACACACCAGGGTTTGTCGTCGCCAGTC |
| | | ACCAAGTCATTCAACCGCGGAGAGTGC |
| 1524 | LC Ab88 | GATATTGTGatgACCCAGACCCCGCTGAGCCTGAGCGTGACCCCGGGCCAGCCGGCGAGCATT |
| | | AGCTGCAAAAGCAGCCGTAGCCTGCTGCATAGCGATGGCAAAACCTATCTGTATTGGTATGTG |
| | | CAGAAAAGCGGCCAGCCGCCGCAGCTGCTGATTTATGAACTGAGCAACCGTTTTAGCGGCGTG |
| | | CCGGATCGTTTTAGCGGCAGCGGCAGCCGTACCGATTTTACCCTGAAAATTAGCCGTGTGGAA |
| | | GCGGAAGATGTGGGCGTGTATTATTGCatgCAGTATATTGAAGCGCCGCTGACCTTTGGCGGC |
| | | GGCACCAAAGTGGAAATTAAACGTACGGTGGCGGCGCCCAGTGTATTCATCTTCCCTCCCTCC |
| | | GACGAGCAGTTGAAGTCGGGGACCGCGTCAGTCGTGTGCCTGCTCAATAACTTTTACCCGCGA |
| | | GAGGCTAAGGTCCAGTGGAAAGTGGATAATGCGCTGCAAAGCGGAAACTCCCAAGAATCAGTG |
| | | ACGGAACAAGACTCAAAAGACTCGACGTATTCGCTCTCATCGACGCTCACGCTTTCAAAAGCA |
| | | GATTACGAGAAGCACAAGGTGTATGCATGTGAAGTGACACACCAGGGTTTGTCGTCGCCAGTC |
| | | ACCAAGTCATTCAACCGCGGAGAGTGC |
| 1525 | LC Ab89 | GATATTGTGatgACCCAGACCCCGCTGAGCCTGAGCGTGACCCCGGGCCAGCCGGCGAGCATT |
| | | AGCTGCCGTAGCAGCCGTAGCCTGCTGCATAGCGATGGCAAAACCTATGTGTATTGGTATGTG |
| | | CAGAAAAGCGGCCAGCCGCCGCAGCTGCTGATTTATGAACTGAGCAACCGTTTTAGCGGCGTG |
| | | CCGGATCGTTTTAGCGGCAGCGGCAGCCGTACCGATTTTACCCTGAAAATTAGCCGTGTGGAA |
| | | GCGGAAGATGTGGGCGTGTATTATTGCatgCAGTATATTGAAGTGCCGCTGACCTTTGGCGGC |
| | | GGCACCAAAGTGGAAATTAAACGTACGGTGGCGGCGCCCAGTGTATTCATCTTCCCTCCCTCC |
| | | GACGAGCAGTTGAAGTCGGGGACCGCGTCAGTCGTGTGCCTGCTCAATAACTTTTACCCGCGA |
| | | GAGGCTAAGGTCCAGTGGAAAGTGGATAATGCGCTGCAAAGCGGAAACTCCCAAGAATCAGTG |
| | | ACGGAACAAGACTCAAAAGACTCGACGTATTCGCTCTCATCGACGCTCACGCTTTCAAAAGCA |
| | | GATTACGAGAAGCACAAGGTGTATGCATGTGAAGTGACACACCAGGGTTTGTCGTCGCCAGTC |
| | | ACCAAGTCATTCAACCGCGGAGAGTGC |
| 1526 | LC Ab90 | GATATTGTGatgACCCAGACCCCGCTGAGCCTGAGCGTGACCCCGGGCCAGCCGGCGAGCATT |
| | | AGCTGCACCAGCAGCCGTAGCCTGCTGCATAGCGATGGCAAAACCTATGTGTATTGGTATGTG |
| | | CAGAAAAGCGGCCAGCCGCCGCAGCTGCTGATTTATGAACTGAGCAACCGTTTTAGCGGCGTG |
| | | CCGGATCGTTTTAGCGGCAGCGGCAGCCGTACCGATTTTACCCTGAAAATTAGCCGTGTGGAA |
| | | GCGGAAGATGTGGGCGTGTATTATTGCatgCAGTATGTGGAAGTGCCGCTGACCTTTGGCGGC |
| | | GGCACCAAAGTGGAAATTAAACGTACGGTGGCGGCGCCCAGTGTATTCATCTTCCCTCCCTCC |
| | | GACGAGCAGTTGAAGTCGGGGACCGCGTCAGTCGTGTGCCTGCTCAATAACTTTTACCCGCGA |
| | | GAGGCTAAGGTCCAGTGGAAAGTGGATAATGCGCTGCAAAGCGGAAACTCCCAAGAATCAGTG |
| | | ACGGAACAAGACTCAAAAGACTCGACGTATTCGCTCTCATCGACGCTCACGCTTTCAAAAGCA |
| | | GATTACGAGAAGCACAAGGTGTATGCATGTGAAGTGACACACCAGGGTTTGTCGTCGCCAGTC |
| | | ACCAAGTCATTCAACCGCGGAGAGTGC |
| 1527 | LC Ab91 | GATATTGTGatgACCCAGACCCCGCTGAGCCTGAGCGTGACCCCGGGCCAGCCGGCGAGCATT |
| | | AGCTGCCGTAGCAGCCGTAGCCTGCTGTGGAGCGATGGCAAAACCTATGTGTATTGGTATGTG |
| | | CAGAAAAGCGGCCAGCCGCCGCAGCTGCTGATTTATGAACTGAGCAACCGTTTTAGCGGCGTG |
| | | CCGGATCGTTTTAGCGGCAGCGGCAGCCGTACCGATTTTACCCTGAAAATTAGCCGTGTGGAA |
| | | GCGGAAGATGTGGGCGTGTATTATTGCatgCAGTATATTGAAGCGCCGCTGACCTTTGGCGGC |
| | | GGCACCAAAGTGGAAATTAAACGTACGGTGGCGGCGCCCAGTGTATTCATCTTCCCTCCCTCC |
| | | GACGAGCAGTTGAAGTCGGGGACCGCGTCAGTCGTGTGCCTGCTCAATAACTTTTACCCGCGA |
| | | GAGGCTAAGGTCCAGTGGAAAGTGGATAATGCGCTGCAAAGCGGAAACTCCCAAGAATCAGTG |
| | | ACGGAACAAGACTCAAAAGACTCGACGTATTCGCTCTCATCGACGCTCACGCTTTCAAAAGCA |
| | | GATTACGAGAAGCACAAGGTGTATGCATGTGAAGTGACACACCAGGGTTTGTCGTCGCCAGTC |
| | | ACCAAGTCATTCAACCGCGGAGAGTGC |
| 1528 | LC Ab92 | GATATTGTGatgACCCAGACCCCGCTGAGCCTGAGCGTGACCCCGGGCCAGCCGGCGAGCATT |
| | | AGCTGCCGTAGCAGCCGTAGCCTGCTGCATAGCGATGGCAAAACCTATGTGTATTGGTATGTG |
| | | CAGAAAAGCGGCCAGCCGCCGCAGCTGCTGATTTATGAACTGAGCAACCGTTTTAGCGGCGTG |
| | | CCGGATCGTTTTAGCGGCAGCGGCAGCCGTACCGATTTTACCCTGAAAATTAGCCGTGTGGAA |
| | | GCGGAAGATGTGGGCGTGTATTATTGCatgCAGTATGTGGAAGCGCCGCTGACCTTTGGCGGC |
| | | GGCACCAAAGTGGAAATTAAACGTACGGTGGCGGCGCCCAGTGTATTCATCTTCCCTCCCTCC |
| | | GACGAGCAGTTGAAGTCGGGGACCGCGTCAGTCGTGTGCCTGCTCAATAACTTTTACCCGCGA |
| | | GAGGCTAAGGTCCAGTGGAAAGTGGATAATGCGCTGCAAAGCGGAAACTCCCAAGAATCAGTG |
| | | ACGGAACAAGACTCAAAAGACTCGACGTATTCGCTCTCATCGACGCTCACGCTTTCAAAAGCA |
| | | GATTACGAGAAGCACAAGGTGTATGCATGTGAAGTGACACACCAGGGTTTGTCGTCGCCAGTC |
| | | ACCAAGTCATTCAACCGCGGAGAGTGC |
| 1529 | LC Ab93 | GATATTGTGatgACCCAGACCCCGCTGAGCCTGAGCGTGACCCCGGGCCAGCCGGCGAGCATT |
| | | AGCTGCAAAAGCAGCCGTAGCCTGCTGCATAGCGATGGCAAAACCTATCTGTATTGGTATGTG |
| | | CAGAAAAGCGGCCAGCCGCCGCAGCTGCTGATTTATGAACTGAGCAACCGTTTTAGCGGCGTG |
| | | CCGGATCGTTTTAGCGGCAGCGGCAGCCGTACCGATTTTACCCTGAAAATTAGCCGTGTGGAA |
| | | GCGGAAGATGTGGGCGTGTATTATTGCatgCAGTATATTGAAGCGCCGCTGACCTTTGGCGGC |
| | | GGCACCAAAGTGGAAATTAAACGTACGGTGGCGGCGCCCAGTGTATTCATCTTCCCTCCCTCC |
| | | GACGAGCAGTTGAAGTCGGGGACCGCGTCAGTCGTGTGCCTGCTCAATAACTTTTACCCGCGA |
| | | GAGGCTAAGGTCCAGTGGAAAGTGGATAATGCGCTGCAAAGCGGAAACTCCCAAGAATCAGTG |
| | | ACGGAACAAGACTCAAAAGACTCGACGTATTCGCTCTCATCGACGCTCACGCTTTCAAAAGCA |
| | | GATTACGAGAAGCACAAGGTGTATGCATGTGAAGTGACACACCAGGGTTTGTCGTCGCCAGTC |
| | | ACCAAGTCATTCAACCGCGGAGAGTGC |
| 1530 | LC Ab94 | GATATTGTGatgACCCAGACCCCGCTGAGCCTGAGCGTGACCCCGGGCCAGCCGGCGAGCATT |
| | | AGCTGCCGTAGCAGCCGTAGCCTGCTGCATAGCGATGGCAAAACCTATGTGTATTGGTATGTG |
| | | CAGAAAAGCGGCCAGCCGCCGCAGCTGCTGATTTATGAACTGAGCAACCGTTTTAGCGGCGTG |
| | | CCGGATCGTTTTAGCGGCAGCGGCAGCCGTACCGATTTTACCCTGAAAATTAGCCGTGTGGAA |
| | | GCGGAAGATGTGGGCGTGTATTATTGCatgCAGTATATTGAAGCGCCGCTGACCTTTGGCGGC |
| | | GGCACCAAAGTGGAAATTAAACGTACGGTGGCGGCGCCCAGTGTATTCATCTTCCCTCCCTCC |
| | | GACGAGCAGTTGAAGTCGGGGACCGCGTCAGTCGTGTGCCTGCTCAATAACTTTTACCCGCGA |
| | | GAGGCTAAGGTCCAGTGGAAAGTGGATAATGCGCTGCAAAGCGGAAACTCCCAAGAATCAGTG |
| | | ACGGAACAAGACTCAAAAGACTCGACGTATTCGCTCTCATCGACGCTCACGCTTTCAAAAGCA |
| | | GATTACGAGAAGCACAAGGTGTATGCATGTGAAGTGACACACCAGGGTTTGTCGTCGCCAGTC |
| | | ACCAAGTCATTCAACCGCGGAGAGTGC |
| 1531 | LC Ab95 | GATATTGTGatgACCCAGACCCCGCTGAGCCTGAGCGTGACCCCGGGCCAGCCGGCGAGCATT |
| | | AGCTGCACCAGCAGCCGTAGCCTGCTGCATAGCGATGGCAAAACCTATGTGTATTGGTATGTG |
| | | CAGAAAAGCGGCCAGCCGCCGCAGCTGCTGATTTATGAACTGAGCAACCGTTTTAGCGGCGTG |
| | | CCGGATCGTTTTAGCGGCAGCGGCAGCCGTACCGATTTTACCCTGAAAATTAGCCGTGTGGAA |
| | | GCGGAAGATGTGGGCGTGTATTATTGCatgCAGTATATTGAAGCGCCGCTGACCTTTGGCGGC |
| | | GGCACCAAAGTGGAAATTAAACGTACGGTGGCGGCGCCCAGTGTATTCATCTTCCCTCCCTCC |
| | | GACGAGCAGTTGAAGTCGGGGACCGCGTCAGTCGTGTGCCTGCTCAATAACTTTTACCCGCGA |
| | | GAGGCTAAGGTCCAGTGGAAAGTGGATAATGCGCTGCAAAGCGGAAACTCCCAAGAATCAGTG |
| | | ACGGAACAAGACTCAAAAGACTCGACGTATTCGCTCTCATCGACGCTCACGCTTTCAAAAGCA |
| | | GATTACGAGAAGCACAAGGTGTATGCATGTGAAGTGACACACCAGGGTTTGTCGTCGCCAGTC |
| | | ACCAAGTCATTCAACCGCGGAGAGTGC |
| 1532 | LC Ab96 | GATATTGTGatgACCCAGACCCCGCTGAGCCTGAGCGTGACCCCGGGCCAGCCGGCGAGCATT |
| | | AGCTGCAAAAGCAGCCGTAGCCTGCTGCATAGCGATGGCAAAACCTATGTGTATTGGTATGTG |
| | | CAGAAAAGCGGCCAGCCGCCGCAGCTGCTGATTTATGAACTGAGCAACCGTTTTAGCGGCGTG |
| | | CCGGATCGTTTTAGCGGCAGCGGCAGCCGTACCGATTTTACCCTGAAAATTAGCCGTGTGGAA |
| | | GCGGAAGATGTGGGCGTGTATTATTGCatgCAGTATATTGAAGCGCCGCTGACCTTTGGCGGC |
| | | GGCACCAAAGTGGAAATTAAACGTACGGTGGCGGCGCCCAGTGTATTCATCTTCCCTCCCTCC |
| | | GACGAGCAGTTGAAGTCGGGGACCGCGTCAGTCGTGTGCCTGCTCAATAACTTTTACCCGCGA |
| | | GAGGCTAAGGTCCAGTGGAAAGTGGATAATGCGCTGCAAAGCGGAAACTCCCAAGAATCAGTG |
| | | ACGGAACAAGACTCAAAAGACTCGACGTATTCGCTCTCATCGACGCTCACGCTTTCAAAAGCA |
| | | GATTACGAGAAGCACAAGGTGTATGCATGTGAAGTGACACACCAGGGTTTGTCGTCGCCAGTC |
| | | ACCAAGTCATTCAACCGCGGAGAGTGC |
| 1533 | LC Ab97 | GATATTGTGatgACCCAGACCCCGCTGAGCCTGAGCGTGACCCCGGGCCAGCCGGCGAGCATT |
| | | AGCTGCAAAAGCAGCCGTAGCCTGCTGCATAGCGATGGCAAAACCTATGTGTATTGGTATGTG |
| | | CAGAAAAGCGGCCAGCCGCCGCAGCTGCTGATTTATGAACTGAGCAACCGTTTTAGCGGCGTG |
| | | CCGGATCGTTTTAGCGGCAGCGGCAGCCGTACCGATTTTACCCTGAAAATTAGCCGTGTGGAA |
| | | GCGGAAGATGTGGGCGTGTATTATTGCatgCAGTATGTGGAAGCGCCGCTGACCTTTGGCGGC |
| | | GGCACCAAAGTGGAAATTAAACGTACGGTGGCGGCGCCCAGTGTATTCATCTTCCCTCCCTCC |
| | | GACGAGCAGTTGAAGTCGGGGACCGCGTCAGTCGTGTGCCTGCTCAATAACTTTTACCCGCGA |
| | | GAGGCTAAGGTCCAGTGGAAAGTGGATAATGCGCTGCAAAGCGGAAACTCCCAAGAATCAGTG |
| | | ACGGAACAAGACTCAAAAGACTCGACGTATTCGCTCTCATCGACGCTCACGCTTTCAAAAGCA |
| | | GATTACGAGAAGCACAAGGTGTATGCATGTGAAGTGACACACCAGGGTTTGTCGTCGCCAGTC |
| | | ACCAAGTCATTCAACCGCGGAGAGTGC |
| 1534 | LC Ab98 | GATATTGTGatgACCCAGACCCCGCTGAGCCTGAGCGTGACCCCGGGCCAGCCGGCGAGCATT |
| | | AGCTGCACCAGCAGCCGTAGCCTGCTGCATAGCGATGGCAAAACCTATGTGTATTGGTATGTG |
| | | CAGAAAAGCGGCCAGCCGCCGCAGCTGCTGATTTATGAACTGAGCAACCGTTTTAGCGGCGTG |
| | | CCGGATCGTTTTAGCGGCAGCGGCAGCCGTACCGATTTTACCCTGAAAATTAGCCGTGTGGAA |
| | | GCGGAAGATGTGGGCGTGTATTATTGCatgCAGTATGTGGAAGTGCCGCTGACCTTTGGCGGC |
| | | GGCACCAAAGTGGAAATTAAACGTACGGTGGCGGCGCCCAGTGTATTCATCTTCCCTCCCTCC |
| | | GACGAGCAGTTGAAGTCGGGGACCGCGTCAGTCGTGTGCCTGCTCAATAACTTTTACCCGCGA |
| | | GAGGCTAAGGTCCAGTGGAAAGTGGATAATGCGCTGCAAAGCGGAAACTCCCAAGAATCAGTG |
| | | ACGGAACAAGACTCAAAAGACTCGACGTATTCGCTCTCATCGACGCTCACGCTTTCAAAAGCA |
| | | GATTACGAGAAGCACAAGGTGTATGCATGTGAAGTGACACACCAGGGTTTGTCGTCGCCAGTC |
| | | ACCAAGTCATTCAACCGCGGAGAGTGC |
| 1535 | LC Ab99 | GATATTGTGatgACCCAGACCCCGCTGAGCCTGAGCGTGACCCCGGGCCAGCCGGCGAGCATT |
| | | AGCTGCCGTAGCAGCCGTAGCCTGCTGTGGAGCGATGGCAAAACCTATGTGTATTGGTATGTG |
| | | CAGAAAAGCGGCCAGCCGCCGCAGCTGCTGATTTATGAACTGAGCAACCGTTTTAGCGGCGTG |
| | | CCGGATCGTTTTAGCGGCAGCGGCAGCCGTACCGATTTTACCCTGAAAATTAGCCGTGTGGAA |
| | | GCGGAAGATGTGGGCGTGTATTATTGCatgCAGTATATTGAAGCGCCGCTGACCTTTGGCGGC |
| | | GGCACCAAAGTGGAAATTAAACGTACGGTGGCGGCGCCCAGTGTATTCATCTTCCCTCCCTCC |
| | | GACGAGCAGTTGAAGTCGGGGACCGCGTCAGTCGTGTGCCTGCTCAATAACTTTTACCCGCGA |
| | | GAGGCTAAGGTCCAGTGGAAAGTGGATAATGCGCTGCAAAGCGGAAACTCCCAAGAATCAGTG |
| | | ACGGAACAAGACTCAAAAGACTCGACGTATTCGCTCTCATCGACGCTCACGCTTTCAAAAGCA |
| | | GATTACGAGAAGCACAAGGTGTATGCATGTGAAGTGACACACCAGGGTTTGTCGTCGCCAGTC |
| | | ACCAAGTCATTCAACCGCGGAGAGTGC |
| 1536 | LC Ab100 | GATATTGTGatgACCCAGACCCCGCTGAGCCTGAGCGTGACCCCGGGCCAGCCGGCGAGCATT |
| | | AGCTGCAAAAGCAGCCGTAGCCTGCTGTGGAGCGATGGCAAAACCTATGTGTATTGGTATGTG |
| | | CAGAAAAGCGGCCAGCCGCCGCAGCTGCTGATTTATGAACTGAGCAACCGTTTTAGCGGCGTG |
| | | CCGGATCGTTTTAGCGGCAGCGGCAGCCGTACCGATTTTACCCTGAAAATTAGCCGTGTGGAA |
| | | GCGGAAGATGTGGGCGTGTATTATTGCatgCAGTATGTGGAAGCGCCGCTGACCTTTGGCGGC |
| | | GGCACCAAAGTGGAAATTAAACGTACGGTGGCGGCGCCCAGTGTATTCATCTTCCCTCCCTCC |
| | | GACGAGCAGTTGAAGTCGGGGACCGCGTCAGTCGTGTGCCTGCTCAATAACTTTTACCCGCGA |
| | | GAGGCTAAGGTCCAGTGGAAAGTGGATAATGCGCTGCAAAGCGGAAACTCCCAAGAATCAGTG |
| | | ACGGAACAAGACTCAAAAGACTCGACGTATTCGCTCTCATCGACGCTCACGCTTTCAAAAGCA |
| | | GATTACGAGAAGCACAAGGTGTATGCATGTGAAGTGACACACCAGGGTTTGTCGTCGCCAGTC |
| | | ACCAAGTCATTCAACCGCGGAGAGTGC |
| 1537 | LC Ab101 | GATATTGTGatgACCCAGACCCCGCTGAGCCTGAGCGTGACCCCGGGCCAGCCGGCGAGCATT |
| | | AGCTGCCGTAGCAGCCGTAGCCTGCTGCATAGCGATGGCAAAACCTATGTGTATTGGTATGTG |
| | | CAGAAAAGCGGCCAGCCGCCGCAGCTGCTGATTTATGAACTGAGCAACCGTTTTAGCGGCGTG |
| | | CCGGATCGTTTTAGCGGCAGCGGCAGCCGTACCGATTTTACCCTGAAAATTAGCCGTGTGGAA |
| | | GCGGAAGATGTGGGCGTGTATTATTGCatgCAGTATATTGAAGCGCCGCTGACCTTTGGCGGC |
| | | GGCACCAAAGTGGAAATTAAACGTACGGTGGCGGCGCCCAGTGTATTCATCTTCCCTCCCTCC |
| | | GACGAGCAGTTGAAGTCGGGGACCGCGTCAGTCGTGTGCCTGCTCAATAACTTTTACCCGCGA |
| | | GAGGCTAAGGTCCAGTGGAAAGTGGATAATGCGCTGCAAAGCGGAAACTCCCAAGAATCAGTG |
| | | ACGGAACAAGACTCAAAAGACTCGACGTATTCGCTCTCATCGACGCTCACGCTTTCAAAAGCA |
| | | GATTACGAGAAGCACAAGGTGTATGCATGTGAAGTGACACACCAGGGTTTGTCGTCGCCAGTC |
| | | ACCAAGTCATTCAACCGCGGAGAGTGC |
| 1538 | LC Ab102 | GATATTGTGatgACCCAGACCCCGCTGAGCCTGAGCGTGACCCCGGGCCAGCCGGCGAGCATT |
| | | AGCTGCACCAGCAGCCGTAGCCTGCTGCATAGCGATGGCAAAACCTATGTGTATTGGTATGTG |
| | | CAGAAAAGCGGCCAGCCGCCGCAGCTGCTGATTTATGAACTGAGCAACCGTTTTAGCGGCGTG |
| | | CCGGATCGTTTTAGCGGCAGCGGCAGCCGTACCGATTTTACCCTGAAAATTAGCCGTGTGGAA |
| | | GCGGAAGATGTGGGCGTGTATTATTGCatgCAGTATATTGAAGCGCCGCTGACCTTTGGCGGC |
| | | GGCACCAAAGTGGAAATTAAACGTACGGTGGCGGCGCCCAGTGTATTCATCTTCCCTCCCTCC |
| | | GACGAGCAGTTGAAGTCGGGGACCGCGTCAGTCGTGTGCCTGCTCAATAACTTTTACCCGCGA |
| | | GAGGCTAAGGTCCAGTGGAAAGTGGATAATGCGCTGCAAAGCGGAAACTCCCAAGAATCAGTG |
| | | ACGGAACAAGACTCAAAAGACTCGACGTATTCGCTCTCATCGACGCTCACGCTTTCAAAAGCA |
| | | GATTACGAGAAGCACAAGGTGTATGCATGTGAAGTGACACACCAGGGTTTGTCGTCGCCAGTC |
| | | ACCAAGTCATTCAACCGCGGAGAGTGC |
| 1539 | LC Ab103 | GATATTGTGatgACCCAGACCCCGCTGAGCCTGAGCGTGACCCCGGGCCAGCCGGCGAGCATT |
| | | AGCTGCAAAAGCAGCCGTAGCCTGCTGCATAGCGATGGCAAAACCTATGTGTATTGGTATGTG |
| | | CAGAAAAGCGGCCAGCCGCCGCAGCTGCTGATTTATGAACTGAGCAACCGTTTTAGCGGCGTG |
| | | CCGGATCGTTTTAGCGGCAGCGGCAGCCGTACCGATTTTACCCTGAAAATTAGCCGTGTGGAA |
| | | GCGGAAGATGTGGGCGTGTATTATTGCatgCAGTATATTGAAGCGCCGCTGACCTTTGGCGGC |
| | | GGCACCAAAGTGGAAATTAAACGTACGGTGGCGGCGCCCAGTGTATTCATCTTCCCTCCCTCC |
| | | GACGAGCAGTTGAAGTCGGGGACCGCGTCAGTCGTGTGCCTGCTCAATAACTTTTACCCGCGA |
| | | GAGGCTAAGGTCCAGTGGAAAGTGGATAATGCGCTGCAAAGCGGAAACTCCCAAGAATCAGTG |
| | | ACGGAACAAGACTCAAAAGACTCGACGTATTCGCTCTCATCGACGCTCACGCTTTCAAAAGCA |
| | | GATTACGAGAAGCACAAGGTGTATGCATGTGAAGTGACACACCAGGGTTTGTCGTCGCCAGTC |
| | | ACCAAGTCATTCAACCGCGGAGAGTGC |
| 1540 | LC Ab104 | GATATTGTGatgACCCAGACCCCGCTGAGCCTGAGCGTGACCCCGGGCCAGCCGGCGAGCATT |
| | | AGCTGCAAAAGCAGCCGTAGCCTGCTGCATAGCGATGGCAAAACCTATGTGTATTGGTATGTG |
| | | CAGAAAAGCGGCCAGCCGCCGCAGCTGCTGATTTATGAACTGAGCAACCGTTTTAGCGGCGTG |
| | | CCGGATCGTTTTAGCGGCAGCGGCAGCCGTACCGATTTTACCCTGAAAATTAGCCGTGTGGAA |
| | | GCGGAAGATGTGGGCGTGTATTATTGCatgCAGTATGTGGAAGCGCCGCTGACCTTTGGCGGC |
| | | GGCACCAAAGTGGAAATTAAACGTACGGTGGCGGCGCCCAGTGTATTCATCTTCCCTCCCTCC |
| | | GACGAGCAGTTGAAGTCGGGGACCGCGTCAGTCGTGTGCCTGCTCAATAACTTTTACCCGCGA |
| | | GAGGCTAAGGTCCAGTGGAAAGTGGATAATGCGCTGCAAAGCGGAAACTCCCAAGAATCAGTG |
| | | ACGGAACAAGACTCAAAAGACTCGACGTATTCGCTCTCATCGACGCTCACGCTTTCAAAAGCA |
| | | GATTACGAGAAGCACAAGGTGTATGCATGTGAAGTGACACACCAGGGTTTGTCGTCGCCAGTC |
| | | ACCAAGTCATTCAACCGCGGAGAGTGC |
| 1541 | LC Ab105 | GATATTGTGatgACCCAGACCCCGCTGAGCCTGAGCGTGACCCCGGGCCAGCCGGCGAGCATT |
| | | AGCTGCACCAGCAGCCGTAGCCTGCTGCATAGCGATGGCAAAACCTATGTGTATTGGTATGTG |
| | | CAGAAAAGCGGCCAGCCGCCGCAGCTGCTGATTTATGAACTGAGCAACCGTTTTAGCGGCGTG |
| | | CCGGATCGTTTTAGCGGCAGCGGCAGCCGTACCGATTTTACCCTGAAAATTAGCCGTGTGGAA |
| | | GCGGAAGATGTGGGCGTGTATTATTGCatgCAGTATGTGGAAGTGCCGCTGACCTTTGGCGGC |
| | | GGCACCAAAGTGGAAATTAAACGTACGGTGGCGGCGCCCAGTGTATTCATCTTCCCTCCCTCC |
| | | GACGAGCAGTTGAAGTCGGGGACCGCGTCAGTCGTGTGCCTGCTCAATAACTTTTACCCGCGA |
| | | GAGGCTAAGGTCCAGTGGAAAGTGGATAATGCGCTGCAAAGCGGAAACTCCCAAGAATCAGTG |
| | | ACGGAACAAGACTCAAAAGACTCGACGTATTCGCTCTCATCGACGCTCACGCTTTCAAAAGCA |
| | | GATTACGAGAAGCACAAGGTGTATGCATGTGAAGTGACACACCAGGGTTTGTCGTCGCCAGTC |
| | | ACCAAGTCATTCAACCGCGGAGAGTGC |
| 1542 | LC Ab106 | GATATTGTGatgACCCAGACCCCGCTGAGCCTGAGCGTGACCCCGGGCCAGCCGGCGAGCATT |
| | | AGCTGCCGTAGCAGCCGTAGCCTGCTGTGGAGCGATGGCAAAACCTATGTGTATTGGTATGTG |
| | | CAGAAAAGCGGCCAGCCGCCGCAGCTGCTGATTTATGAACTGAGCAACCGTTTTAGCGGCGTG |
| | | CCGGATCGTTTTAGCGGCAGCGGCAGCCGTACCGATTTTACCCTGAAAATTAGCCGTGTGGAA |
| | | GCGGAAGATGTGGGCGTGTATTATTGCatgCAGTATATTGAAGCGCCGCTGACCTTTGGCGGC |
| | | GGCACCAAAGTGGAAATTAAACGTACGGTGGCGGCGCCCAGTGTATTCATCTTCCCTCCCTCC |
| | | GACGAGCAGTTGAAGTCGGGGACCGCGTCAGTCGTGTGCCTGCTCAATAACTTTTACCCGCGA |
| | | GAGGCTAAGGTCCAGTGGAAAGTGGATAATGCGCTGCAAAGCGGAAACTCCCAAGAATCAGTG |
| | | ACGGAACAAGACTCAAAAGACTCGACGTATTCGCTCTCATCGACGCTCACGCTTTCAAAAGCA |
| | | GATTACGAGAAGCACAAGGTGTATGCATGTGAAGTGACACACCAGGGTTTGTCGTCGCCAGTC |
| | | ACCAAGTCATTCAACCGCGGAGAGTGC |
| 1543 | LC Ab107 | GATATTGTGatgACCCAGACCCCGCTGAGCCTGAGCGTGACCCCGGGCCAGCCGGCGAGCATT |
| | | AGCTGCAAAAGCAGCCGTAGCCTGCTGTGGAGCGATGGCAAAACCTATGTGTATTGGTATGTG |
| | | CAGAAAAGCGGCCAGCCGCCGCAGCTGCTGATTTATGAACTGAGCAACCGTTTTAGCGGCGTG |
| | | CCGGATCGTTTTAGCGGCAGCGGCAGCCGTACCGATTTTACCCTGAAAATTAGCCGTGTGGAA |
| | | GCGGAAGATGTGGGCGTGTATTATTGCatgCAGTATGTGGAAGCGCCGCTGACCTTTGGCGGC |
| | | GGCACCAAAGTGGAAATTAAACGTACGGTGGCGGCGCCCAGTGTATTCATCTTCCCTCCCTCC |
| | | GACGAGCAGTTGAAGTCGGGGACCGCGTCAGTCGTGTGCCTGCTCAATAACTTTTACCCGCGA |
| | | GAGGCTAAGGTCCAGTGGAAAGTGGATAATGCGCTGCAAAGCGGAAACTCCCAAGAATCAGTG |
| | | ACGGAACAAGACTCAAAAGACTCGACGTATTCGCTCTCATCGACGCTCACGCTTTCAAAAGCA |
| | | GATTACGAGAAGCACAAGGTGTATGCATGTGAAGTGACACACCAGGGTTTGTCGTCGCCAGTC |
| | | ACCAAGTCATTCAACCGCGGAGAGTGC |
| 1544 | VHCDR1 (IMGT) | GFTFSSYA |
| | Ab1 | |
| 1545 | VHCDR2 (IMGT) | ISYDGSNK |
| | Ab1 | |
| 1546 | VHCDR3 (IMGT) | VRGAGRGYTYGPDGFDI |
| | Ab1 | |
| 1547 | VLCDR1 (IMGT) | QSLVYTDGITY |
| | Ab1 | |
| 1548 | VLCDR2 (IMGT) | EIS |
| | Ab1 | |
| 1549 | VLCDR3 (IMGT) | MQATQFPWT |
| | Ab1 | |
| 1550 | VHCDR1 (IMGT) | GFTFSSYA |
| | Ab2 | |
| 1551 | VHCDR2 (IMGT) | ISYDGSNK |
| | Ab2 | |
| 1552 | VHCDR3 (IMGT) | VRGAGRGYTYGPDGFDI |
| | Ab2 | |
| 1553 | VLCDR1 (IMGT) | QSITNY |
| | Ab2 | |
| 1554 | VLCDR2 (IMGT) | AAS |
| | Ab2 | |
| 1555 | VLCDR3 (IMGT) | QQSYTTPFT |
| | Ab2 | |
| 1556 | VHCDR1 (IMGT) | GFTFSQYS |
| | Ab3 | |
| 1557 | VHCDR2 (IMGT) | ISFDGADK |
| | Ab3 | |
| 1558 | VHCDR3 (IMGT) | VRGAGRGYTYGPDGFDI |
| | Ab3 | |
| 1559 | VLCDR1 (IMGT) | QTISRY |
| | Ab3 | |
| 1560 | VLCDR2 (IMGT) | TAT |
| | Ab3 | |
| 1561 | VLCDR3 (IMGT) | QQTYSAPLT |
| | Ab3 | |
| 1562 | VHCDR1 (IMGT) | GFTFSSYA |
| | Ab4 | |
| 1563 | VHCDR2 (IMGT) | ISYDGSNK |
| | Ab4 | |
| 1564 | VHCDR3 (IMGT) | VRGAGRGYTYGPDGFDI |
| | Ab4 | |
| 1565 | VLCDR1 (IMGT) | QSLIFGDGKTY |
| | Ab4 | |
| 1566 | VLCDR2 (IMGT) | QVS |
| | Ab4 | |
| 1567 | VLCDR3 (IMGT) | MQAKQFPWT |
| | Ab4 | |
| 1568 | VHCDR1 (IMGT) | GFTFGHYA |
| | Ab5 | |
| 1569 | VHCDR2 (IMGT) | ISYDGSNK |
| | Ab5 | |
| 1570 | VHCDR3 (IMGT) | VRGAGRGYTYGPDGFDI |
| | Ab5 | |
| 1571 | VLCDR1 (IMGT) | QSLLYSDGKTY |
| | Ab5 | |
| 1572 | VLCDR2 (IMGT) | EVS |
| | Ab5 | |
| 1573 | VLCDR3 (IMGT) | MQATRFPWT |
| | Ab5 | |
| 1574 | VHCDR1 (IMGT) | GFTFSSYA |
| | Ab6 | |
| 1575 | VHCDR2 (IMGT) | ISYDGSNK |
| | Ab6 | |
| 1576 | VHCDR3 (IMGT) | VRGAGRGYTYGPDGFDI |
| | Ab6 | |
| 1577 | VLCDR1 (IMGT) | QSLVYTDGITY |
| | Ab6 | |
| 1578 | VLCDR2 (IMGT) | EIS |
| | Ab6 | |
| 1579 | VLCDR3 (IMGT) | MQATQFPWT |
| | Ab6 | |
| 1580 | VHCDR1 (IMGT) | GFTFSGYA |
| | Ab7 | |
| 1581 | VHCDR2 (IMGT) | ISYDGSNK |
| | Ab7 | |
| 1582 | VHCDR3 (IMGT) | VRGAGRGYTYGPDGFDI |
| | Ab7 | |
| 1583 | VLCDR1 (IMGT) | ESLVYRDGNTY |
| | Ab7 | |
| 1584 | VLCDR2 (IMGT) | KVS |
| | Ab7 | |
| 1585 | VLCDR3 (IMGT) | MQATQFPWT |
| | Ab7 | |
| 1586 | VHCDR1 (IMGT) | GFTFSSYA |
| | Ab8 | |
| 1587 | VHCDR2 (IMGT) | ISYDGSNK |
| | Ab8 | |
| 1588 | VHCDR3 (IMGT) | VRGAGRGYTYGPDGFDI |
| | Ab8 | |
| 1589 | VLCDR1 (IMGT) | QSLVYSDGNTY |
| | Ab8 | |
| 1590 | VLCDR2 (IMGT) | KVS |
| | Ab8 | |
| 1591 | VLCDR3 (IMGT) | MQATRFPWT |
| | Ab8 | |
| 1592 | VHCDR1 (IMGT) | GFSFTTHA |
| | Ab9 | |
| 1593 | VHCDR2 (IMGT) | ISYDGSEK |
| | Ab9 | |
| 1594 | VHCDR3 (IMGT) | VRGAGRGYTYGPDGFDI |
| | Ab9 | |
| 1595 | VLCDR1 (IMGT) | QSLLHSDGKTY |
| | Ab9 | |
| 1596 | VLCDR2 (IMGT) | EVS |
| | Ab9 | |
| 1597 | VLCDR3 (IMGT) | MQYINLPLT |
| | Ab9 | |
| 1598 | VHCDR1 (IMGT) | GFTFGHYA |
| | Ab10 | |
| 1599 | VHCDR2 (IMGT) | ISYDGSNK |
| | Ab10 | |
| 1600 | VHCDR3 (IMGT) | VRGAGRGYTYGPDGFDI |
| | Ab10 | |
| 1601 | VLCDR1 (IMGT) | QSLVYSDGNTY |
| | Ab10 | |
| 1602 | VLCDR2 (IMGT) | KVS |
| | Ab10 | |
| 1603 | VLCDR3 (IMGT) | ?? |
| | Ab10 | |
| 1604 | VHCDR1 (IMGT) | GFTFSSYA |
| | Ab11 | |
| 1605 | VHCDR2 (IMGT) | ISYDGSNK |
| | Ab11 | |
| 1606 | VHCDR3 (IMGT) | VRGAGRGYTYGPDGFDI |
| | Ab11 | |
| 1607 | VLCDR1 (IMGT) | QSLVYTDGITY |
| | Ab11 | |
| 1608 | VLCDR2 (IMGT) | EIS |
| | Ab11 | |
| 1609 | VLCDR3 (IMGT) | MQATQFPWT |
| | Ab11 | |
| 1610 | VHCDR1 (IMGT) | GYRFTSHD |
| | Ab12 | |
| 1611 | VHCDR2 (IMGT) | INPNNDIT |
| | Ab12 | |
| 1612 | VHCDR3 (IMGT) | ARGAGMLFHAVGQFDS |
| | Ab12 | |
| 1613 | VLCDR1 (IMGT) | QDIRKN |
| | Ab12 | |
| 1614 | VLCDR2 (IMGT) | DAS |
| | Ab12 | |
| 1615 | VLCDR3 (IMGT) | LQYGDLPLT |
| | Ab12 | |
| 1616 | VHCDR1 (IMGT) | GYRFTSHD |
| | Ab13 | |
| 1617 | VHCDR2 (IMGT) | INPNNDIT |
| | Ab13 | |
| 1618 | VHCDR3 (IMGT) | ARGAGMLFHAVGQFDS |
| | Ab13 | |
| 1619 | VLCDR1 (IMGT) | QSIGRF |
| | Ab13 | |
| 1620 | VLCDR2 (IMGT) | TAS |
| | Ab13 | |
| 1621 | VLCDR3 (IMGT) | QQFKNYPT |
| | Ab13 | |
| 1622 | VHCDR1 (IMGT) | GFTVSSNY |
| | Ab14 | |
| 1623 | VHCDR2 (IMGT) | IFSDGTT |
| | Ab14 | |
| 1624 | VHCDR3 (IMGT) | VAGPANGAYDI |
| | Ab14 | |
| 1625 | VLCDR1 (IMGT) | QSISNW |
| | Ab14 | |
| 1626 | VLCDR2 (IMGT) | RAS |
| | Ab14 | |
| 1627 | VLCDR3 (IMGT) | QQYNVYSGT |
| | Ab14 | |
| 1628 | VHCDR1 (IMGT) | GFTFSSYA |
| | Ab15 | |
| 1629 | VHCDR2 (IMGT) | ISYDGSNK |
| | Ab15 | |
| 1630 | VHCDR3 (IMGT) | VRGAGRGYTYGPDGFDI |
| | Ab15 | |
| 1631 | VLCDR1 (IMGT) | RSLLHSDGKTY |
| | Ab15 | |
| 1632 | VLCDR2 (IMGT) | ELS |
| | Ab15 | |
| 1633 | VLCDR3 (IMGT) | MQYIEAPLT |
| | Ab15 | |
| 1634 | VHCDR1 (IMGT) | GFTFSSYA |
| | Ab16 | |
| 1635 | VHCDR2 (IMGT) | ISYDGSNK |
| | Ab16 | |
| 1636 | VHCDR3 (IMGT) | VRGAGRGYTRGPDGFDI |
| | Ab16 | |
| 1637 | VLCDR1 (IMGT) | RSLLHSDGKTY |
| | Ab16 | |
| 1638 | VLCDR2 (IMGT) | ELS |
| | Ab16 | |
| 1639 | VLCDR3 (IMGT) | MQYIEAPLT |
| | Ab16 | |
| 1640 | VHCDR1 (IMGT) | GFTFSSYA |
| | Ab17 | |
| 1641 | VHCDR2 (IMGT) | ISYDGSNK |
| | Ab17 | |
| 1642 | VHCDR3 (IMGT) | VRGAGRGYTNGPDGFDI |
| | Ab17 | |
| 1643 | VLCDR1 (IMGT) | RSLLHSDGKTY |
| | Ab17 | |
| 1644 | VLCDR2 (IMGT) | ELS |
| | Ab17 | |
| 1645 | VLCDR3 (IMGT) | MQYIEAPLT |
| | Ab17 | |
| 1646 | VHCDR1 (IMGT) | GFTFSSYA |
| | Ab18 | |
| 1647 | VHCDR2 (IMGT) | ISYDGSNK |
| | Ab18 | |
| 1648 | VHCDR3 (IMGT) | VRGAGRGFTWGPDGFDI |
| | Ab18 | |
| 1649 | VLCDR1 (IMGT) | RSLLHSDGKTY |
| | Ab18 | |
| 1650 | VLCDR2 (IMGT) | ELS |
| | Ab18 | |
| 1651 | VLCDR3 (IMGT) | MQYIEAPLT |
| | Ab18 | |
| 1652 | VHCDR1 (IMGT) | GFTFSSYA |
| | Ab19 | |
| 1653 | VHCDR2 (IMGT) | ISYDGSNK |
| | Ab19 | |
| 1654 | VHCDR3 (IMGT) | VRGAGRGFTLGPDGFDI |
| | Ab19 | |
| 1655 | VLCDR1 (IMGT) | RSLLHSDGKTY |
| | Ab19 | |
| 1656 | VLCDR2 (IMGT) | ELS |
| | Ab19 | |
| 1657 | VLCDR3 (IMGT) | MQYIEAPLT |
| | Ab19 | |
| 1658 | VHCDR1 (IMGT) | GFTFSSYA |
| | Ab20 | |
| 1659 | VHCDR2 (IMGT) | ISYDGSNK |
| | Ab20 | |
| 1660 | VHCDR3 (IMGT) | VRGAGRGLTFGPDGFDI |
| | Ab20 | |
| 1661 | VLCDR1 (IMGT) | RSLLHSDGKTY |
| | Ab20 | |
| 1662 | VLCDR2 (IMGT) | ELS |
| | Ab20 | |
| 1663 | VLCDR3 (IMGT) | MQYIEAPLT |
| | Ab20 | |
| 1664 | VHCDR1 (IMGT) | GFTFSSYA |
| | Ab21 | |
| 1665 | VHCDR2 (IMGT) | ISYDGSNK |
| | Ab21 | |
| 1666 | VHCDR3 (IMGT) | VRGAGLGWPYGPDGFDI |
| | Ab21 | |
| 1667 | VLCDR1 (IMGT) | RSLLHSDGKTY |
| | Ab21 | |
| 1668 | VLCDR2 (IMGT) | ELS |
| | Ab21 | |
| 1669 | VLCDR3 (IMGT) | MQYIEAPLT |
| | Ab21 | |
| 1670 | VHCDR1 (IMGT) | GFTFSSYA |
| | Ab22 | |
| 1671 | VHCDR2 (IMGT) | ISYDGSNK |
| | Ab22 | |
| 1672 | VHCDR3 (IMGT) | VRGAGRGFTKGPDGFDI |
| | Ab22 | |
| 1673 | VLCDR1 (IMGT) | RSLLHSDGKTY |
| | Ab22 | |
| 1674 | VLCDR2 (IMGT) | ELS |
| | Ab22 | |
| 1675 | VLCDR3 (IMGT) | MQYIEAPLT |
| | Ab22 | |
| 1676 | VHCDR1 (IMGT) | GFTFSSYA |
| | Ab23 | |
| 1677 | VHCDR2 (IMGT) | ISYDGSNK |
| | Ab23 | |
| 1678 | VHCDR3 (IMGT) | VRGAGRGLTYGPDGFDI |
| | Ab23 | |
| 1679 | VLCDR1 (IMGT) | RSLLHSDGKTY |
| | Ab23 | |
| 1680 | VLCDR2 (IMGT) | ELS |
| | Ab23 | |
| 1681 | VLCDR3 (IMGT) | MQYIEAPLT |
| | Ab23 | |
| 1682 | VHCDR1 (IMGT) | GFTFSSYA |
| | Ab24 | |
| 1683 | VHCDR2 (IMGT) | ISYDGSNK |
| | Ab24 | |
| 1684 | VHCDR3 (IMGT) | VRGAGRGLIYGPDGFDI |
| | Ab24 | |
| 1685 | VLCDR1 (IMGT) | RSLLHSDGKTY |
| | Ab24 | |
| 1686 | VLCDR2 (IMGT) | ELS |
| | Ab24 | |
| 1687 | VLCDR3 (IMGT) | MQYIEAPLT |
| | Ab24 | |
| 1688 | VHCDR1 (IMGT) | GFTFSSYA |
| | Ab25 | |
| 1689 | VHCDR2 (IMGT) | ISYDGSNK |
| | Ab25 | |
| 1690 | VHCDR3 (IMGT) | VRGAGLGFTYGPDGFDI |
| | Ab25 | |
| 1691 | VLCDR1 (IMGT) | RSLLHSDGKTY |
| | Ab25 | |
| 1692 | VLCDR2 (IMGT) | ELS |
| | Ab25 | |
| 1693 | VLCDR3 (IMGT) | MQYIEAPLT |
| | Ab25 | |
| 1694 | VHCDR1 (IMGT) | GFTFSSYA |
| | Ab26 | |
| 1695 | VHCDR2 (IMGT) | ISYDGSNK |
| | Ab26 | |
| 1696 | VHCDR3 (IMGT) | VRGAGQGLSYGPDGFDI |
| | Ab26 | |
| 1697 | VLCDR1 (IMGT) | RSLLHSDGKTY |
| | Ab26 | |
| 1698 | VLCDR2 (IMGT) | ELS |
| | Ab26 | |
| 1699 | VLCDR3 (IMGT) | MQYIEAPLT |
| | Ab26 | |
| 1700 | VHCDR1 (IMGT) | GFTFSSYA |
| | Ab27 | |
| 1701 | VHCDR2 (IMGT) | ISYDGSNK |
| | Ab27 | |
| 1702 | VHCDR3 (IMGT) | VRGAGRGYTLGPDGFDI |
| | Ab27 | |
| 1703 | VLCDR1 (IMGT) | RSLLHSDGKTY |
| | Ab27 | |
| 1704 | VLCDR2 (IMGT) | ELS |
| | Ab27 | |
| 1705 | VLCDR3 (IMGT) | MQYIEAPLT |
| | Ab27 | |
| 1706 | VHCDR1 (IMGT) | GFTFSSYA |
| | Ab28 | |
| 1707 | VHCDR2 (IMGT) | ISYDGSNK |
| | Ab28 | |
| 1708 | VHCDR3 (IMGT) | VRGAGRGFTYGPDGFDI |
| | Ab28 | |
| 1709 | VLCDR1 (IMGT) | RSLLHSDGKTY |
| | Ab28 | |
| 1710 | VLCDR2 (IMGT) | ELS |
| | Ab28 | |
| 1711 | VLCDR3 (IMGT) | MQYIEAPLT |
| | Ab28 | |
| 1712 | VHCDR1 (IMGT) | GFTFSSYA |
| | Ab29 | |
| 1713 | VHCDR2 (IMGT) | ISYDGSNK |
| | Ab29 | |
| 1714 | VHCDR3 (IMGT) | VRGAGLGWPYGPDGFDI |
| | Ab29 | |
| 1715 | VLCDR1 (IMGT) | RSLLHSDGKTY |
| | Ab29 | |
| 1716 | VLCDR2 (IMGT) | ELS |
| | Ab29 | |
| 1717 | VLCDR3 (IMGT) | MQYVEAPLT |
| | Ab29 | |
| 1718 | VHCDR1 (IMGT) | GFTFSSYA |
| | Ab30 | |
| 1719 | VHCDR2 (IMGT) | ISYDGSNK |
| | Ab30 | |
| 1720 | VHCDR3 (IMGT) | VRGAGRGFTWGPDGFDI |
| | Ab30 | |
| 1721 | VLCDR1 (IMGT) | RSLLHSDGKTY |
| | Ab30 | |
| 1722 | VLCDR2 (IMGT) | ELS |
| | Ab30 | |
| 1723 | VLCDR3 (IMGT) | MQYVEAPLT |
| | Ab30 | |
| 1724 | VHCDR1 (IMGT) | GFTFSSYA |
| | Ab31 | |
| 1725 | VHCDR2 (IMGT) | ISYDGSNK |
| | Ab31 | |
| 1726 | VHCDR3 (IMGT) | VRGAGRGLTYGPDGFDI |
| | Ab31 | |
| 1727 | VLCDR1 (IMGT) | RSLLHSDGKTY |
| | Ab31 | |
| 1728 | VLCDR2 (IMGT) | ELS |
| | Ab31 | |
| 1729 | VLCDR3 (IMGT) | MQYVEAPLT |
| | Ab31 | |
| 1730 | VHCDR1 (IMGT) | GFTFSSYA |
| | Ab32 | |
| 1731 | VHCDR2 (IMGT) | ISYDGSNK |
| | Ab32 | |
| 1732 | VHCDR3 (IMGT) | VRGAGLGFTYGPDGFDI |
| | Ab32 | |
| 1733 | VLCDR1 (IMGT) | RSLLHSDGKTY |
| | Ab32 | |
| 1734 | VLCDR2 (IMGT) | ELS |
| | Ab32 | |
| 1735 | VLCDR3 (IMGT) | MQYVEAPLT |
| | Ab32 | |
| 1736 | VHCDR1 (IMGT) | GFTFSSYA |
| | Ab33 | |
| 1737 | VHCDR2 (IMGT) | ISYDGSNK |
| | Ab33 | |
| 1738 | VHCDR3 (IMGT) | VRGAGQGLSYGPDGFDI |
| | Ab33 | |
| 1739 | VLCDR1 (IMGT) | RSLLHSDGKTY |
| | Ab33 | |
| 1740 | VLCDR2 (IMGT) | ELS |
| | Ab33 | |
| 1741 | VLCDR3 (IMGT) | MQYVEAPLT |
| | Ab33 | |
| 1742 | VHCDR1 (IMGT) | GFTFSSYA |
| | Ab34 | |
| 1743 | VHCDR2 (IMGT) | ISYDGSNK |
| | Ab34 | |
| 1744 | VHCDR3 (IMGT) | VRGAGRGYTRGPDGFDI |
| | Ab34 | |
| 1745 | VLCDR1 (IMGT) | RSLLHSDGKTY |
| | Ab34 | |
| 1746 | VLCDR2 (IMGT) | ELS |
| | Ab34 | |
| 1747 | VLCDR3 (IMGT) | MQYVEAPLT |
| | Ab34 | |
| 1748 | VHCDR1 (IMGT) | GFTFSSYA |
| | Ab35 | |
| 1749 | VHCDR2 (IMGT) | ISYDGSNK |
| | Ab35 | |
| 1750 | VHCDR3 (IMGT) | VRGAGRGYTNGPDGFDI |
| | Ab35 | |
| 1751 | VLCDR1 (IMGT) | RSLLHSDGKTY |
| | Ab35 | |
| 1752 | VLCDR2 (IMGT) | ELS |
| | Ab35 | |
| 1753 | VLCDR3 (IMGT) | MQYVEAPLT |
| | Ab35 | |
| 1754 | VHCDR1 (IMGT) | GFTFSSYA |
| | Ab36 | |
| 1755 | VHCDR2 (IMGT) | ISYDGSNK |
| | Ab36 | |
| 1756 | VHCDR3 (IMGT) | VRGAGRGFTYGPDGFDI |
| | Ab36 | |
| 1757 | VLCDR1 (IMGT) | RSLLHSDGKTY |
| | Ab36 | |
| 1758 | VLCDR2 (IMGT) | ELS |
| | Ab36 | |
| 1759 | VLCDR3 (IMGT) | MQYIEAPLT |
| | Ab36 | |
| 1760 | VHCDR1 (IMGT) | GFTFSSYA |
| | Ab37 | |
| 1761 | VHCDR2 (IMGT) | ISYDGSNK |
| | Ab37 | |
| 1762 | VHCDR3 (IMGT) | VRGAGRGLTYGPDGFDI |
| | Ab37 | |
| 1763 | VLCDR1 (IMGT) | RSLLHSDGKTY |
| | Ab37 | |
| 1764 | VLCDR2 (IMGT) | ELS |
| | Ab37 | |
| 1765 | VLCDR3 (IMGT) | MQYIEAPLT |
| | Ab37 | |
| 1766 | VHCDR1 (IMGT) | GFTFSSYA |
| | Ab38 | |
| 1767 | VHCDR2 (IMGT) | ISYDGSNK |
| | Ab38 | |
| 1768 | VHCDR3 (IMGT) | VRGAGQGYPYGPDGFDI |
| | Ab38 | |
| 1769 | VLCDR1 (IMGT) | RSLLHSDGKTY |
| | Ab38 | |
| 1770 | VLCDR2 (IMGT) | ELS |
| | Ab38 | |
| 1771 | VLCDR3 (IMGT) | MQYIEAPLT |
| | Ab38 | |
| 1772 | VHCDR1 (IMGT) | GFTFSSYA |
| | Ab39 | |
| 1773 | VHCDR2 (IMGT) | ISYDGSNK |
| | Ab39 | |
| 1774 | VHCDR3 (IMGT) | VRGAGTGFTYGPDGFDI |
| | Ab39 | |
| 1775 | VLCDR1 (IMGT) | RSLLHSDGKTY |
| | Ab39 | |
| 1776 | VLCDR2 (IMGT) | ELS |
| | Ab39 | |
| 1777 | VLCDR3 (IMGT) | MQYIEAPLT |
| | Ab39 | |
| 1778 | VHCDR1 (IMGT) | GFTFSSYA |
| | Ab40 | |
| 1779 | VHCDR2 (IMGT) | ISYDGSNK |
| | Ab40 | |
| 1780 | VHCDR3 (IMGT) | VRGAGMGLTYGPDGFDI |
| | Ab40 | |
| 1781 | VLCDR1 (IMGT) | RSLLHSDGKTY |
| | Ab40 | |
| 1782 | VLCDR2 (IMGT) | ELS |
| | Ab40 | |
| 1783 | VLCDR3 (IMGT) | MQYIEAPLT |
| | Ab40 | |
| 1784 | VHCDR1 (IMGT) | GFTFSSYA |
| | Ab41 | |
| 1785 | VHCDR2 (IMGT) | ISYDGSNK |
| | Ab41 | |
| 1786 | VHCDR3 (IMGT) | VRGAGLGFPYGPDGFDI |
| | Ab41 | |
| 1787 | VLCDR1 (IMGT) | RSLLHSDGKTY |
| | Ab41 | |
| 1788 | VLCDR2 (IMGT) | ELS |
| | Ab41 | |
| 1789 | VLCDR3 (IMGT) | MQYIEAPLT |
| | Ab41 | |
| 1790 | VHCDR1 (IMGT) | GFTFSSYA |
| | Ab42 | |
| 1791 | VHCDR2 (IMGT) | ISYDGSNK |
| | Ab42 | |
| 1792 | VHCDR3 (IMGT) | VRGAGLGWAYGPDGFDI |
| | Ab42 | |
| 1793 | VLCDR1 (IMGT) | RSLLHSDGKTY |
| | Ab42 | |
| 1794 | VLCDR2 (IMGT) | ELS |
| | Ab42 | |
| 1795 | VLCDR3 (IMGT) | MQYIEAPLT |
| | Ab42 | |
| 1796 | VHCDR1 (IMGT) | GFTFSSYA |
| | Ab43 | |
| 1797 | VHCDR2 (IMGT) | ISYDGSNK |
| | Ab43 | |
| 1798 | VHCDR3 (IMGT) | VRGAGRGYPYGPDGFDI |
| | Ab43 | |
| 1799 | VLCDR1 (IMGT) | RSLLHSDGKTY |
| | Ab43 | |
| 1800 | VLCDR2 (IMGT) | ELS |
| | Ab43 | |
| 1801 | VLCDR3 (IMGT) | MQYIEAPLT |
| | Ab43 | |
| 1802 | VHCDR1 (IMGT) | GFDFAGYA |
| | Ab44 | |
| 1803 | VHCDR2 (IMGT) | ISYDGSNK |
| | Ab44 | |
| 1804 | VHCDR3 (IMGT) | VRGAGRGLTYGPDGFDI |
| | Ab44 | |
| 1805 | VLCDR1 (IMGT) | RSLLHSDGKTY |
| | Ab44 | |
| 1806 | VLCDR2 (IMGT) | ELS |
| | Ab44 | |
| 1807 | VLCDR3 (IMGT) | MQYIEAPLT |
| | Ab44 | |
| 1808 | VHCDR1 (IMGT) | GFTFSSYA |
| | Ab45 | |
| 1809 | VHCDR2 (IMGT) | ISYDGSNK |
| | Ab45 | |
| 1810 | VHCDR3 (IMGT) | VRGAGLGLTYGPDGFDI |
| | Ab45 | |
| 1811 | VLCDR1 (IMGT) | RSLLHSDGKTY |
| | Ab45 | |
| 1812 | VLCDR2 (IMGT) | ELS |
| | Ab45 | |
| 1813 | VLCDR3 (IMGT) | MQYIEAPLT |
| | Ab45 | |
| 1814 | VHCDR1 (IMGT) | GFTFSSYA |
| | Ab46 | |
| 1815 | VHCDR2 (IMGT) | ISYDGSNK |
| | Ab46 | |
| 1816 | VHCDR3 (IMGT) | VRGAGLGYPYGPDGFDI |
| | Ab46 | |
| 1817 | VLCDR1 (IMGT) | RSLLHSDGKTY |
| | Ab46 | |
| 1818 | VLCDR2 (IMGT) | ELS |
| | Ab46 | |
| 1819 | VLCDR3 (IMGT) | MQYIEAPLT |
| | Ab46 | |
| 1820 | VHCDR1 (IMGT) | GFTFSSYA |
| | Ab47 | |
| 1821 | VHCDR2 (IMGT) | ISYDGSNK |
| | Ab47 | |
| 1822 | VHCDR3 (IMGT) | VRGAGRGYPHGPDGFDI |
| | Ab47 | |
| 1823 | VLCDR1 (IMGT) | RSLLHSDGKTY |
| | Ab47 | |
| 1824 | VLCDR2 (IMGT) | ELS |
| | Ab47 | |
| 1825 | VLCDR3 (IMGT) | MQYIEAPLT |
| | Ab47 | |
| 1826 | VHCDR1 (IMGT) | GFTFSSYA |
| | Ab48 | |
| 1827 | VHCDR2 (IMGT) | ISYDGSNK |
| | Ab48 | |
| 1828 | VHCDR3 (IMGT) | VRGAGIGYPHGPDGFDI |
| | Ab48 | |
| 1829 | VLCDR1 (IMGT) | RSLLHSDGKTY |
| | Ab48 | |
| 1830 | VLCDR2 (IMGT) | ELS |
| | Ab48 | |
| 1831 | VLCDR3 (IMGT) | MQYIEAPLT |
| | Ab48 | |
| 1832 | VHCDR1 (IMGT) | GFTFSSYA |
| | Ab49 | |
| 1833 | VHCDR2 (IMGT) | ISYDGSNK |
| | Ab49 | |
| 1834 | VHCDR3 (IMGT) | VRGAGRGYPYGPDGFDI |
| | Ab49 | |
| 1835 | VLCDR1 (IMGT) | RSLLHSDGKTY |
| | Ab49 | |
| 1836 | VLCDR2 (IMGT) | ELS |
| | Ab49 | |
| 1837 | VLCDR3 (IMGT) | MQYIEAPLT |
| | Ab49 | |
| 1838 | VHCDR1 (IMGT) | GFTFSSYA |
| | Ab50 | |
| 1839 | VHCDR2 (IMGT) | ISYDGSNK |
| | Ab50 | |
| 1840 | VHCDR3 (IMGT) | VRGAGLGFPFGPDGFDI |
| | Ab50 | |
| 1841 | VLCDR1 (IMGT) | RSLLHSDGKTY |
| | Ab50 | |
| 1842 | VLCDR2 (IMGT) | ELS |
| | Ab50 | |
| 1843 | VLCDR3 (IMGT) | MQYIEAPLT |
| | Ab50 | |
| 1844 | VHCDR1 (IMGT) | GFTFSSYA |
| | Ab51 | |
| 1845 | VHCDR2 (IMGT) | ISYDGSNK |
| | Ab51 | |
| 1846 | VHCDR3 (IMGT) | VRGAGRGFPYGPDGFDI |
| | Ab51 | |
| 1847 | VLCDR1 (IMGT) | RSLLHSDGKTY |
| | Ab51 | |
| 1848 | VLCDR2 (IMGT) | ELS |
| | Ab51 | |
| 1849 | VLCDR3 (IMGT) | MQYIEAPLT |
| | Ab51 | |
| 1850 | VHCDR1 (IMGT) | GFTFSSYA |
| | Ab52 | |
| 1851 | VHCDR2 (IMGT) | ISYDGSNK |
| | Ab52 | |
| 1852 | VHCDR3 (IMGT) | VRGAGLGYPNGPDGFDI |
| | Ab52 | |
| 1853 | VLCDR1 (IMGT) | RSLLHSDGKTY |
| | Ab52 | |
| 1854 | VLCDR2 (IMGT) | ELS |
| | Ab52 | |
| 1855 | VLCDR3 (IMGT) | MQYIEAPLT |
| | Ab52 | |
| 1856 | VHCDR1 (IMGT) | GFTFSSYA |
| | Ab53 | |
| 1857 | VHCDR2 (IMGT) | ISYDGSNK |
| | Ab53 | |
| 1858 | VHCDR3 (IMGT) | VRGAGQGFPYGPDGFDI |
| | Ab53 | |
| 1859 | VLCDR1 (IMGT) | RSLLHSDGKTY |
| | Ab53 | |
| 1860 | VLCDR2 (IMGT) | ELS |
| | Ab53 | |
| 1861 | VLCDR3 (IMGT) | MQYIEAPLT |
| | Ab53 | |
| 1862 | VHCDR1 (IMGT) | GFTFSSYA |
| | Ab54 | |
| 1863 | VHCDR2 (IMGT) | ISYDGSNK |
| | Ab54 | |
| 1864 | VHCDR3 (IMGT) | VRGAGQGYPYGPDGFDI |
| | Ab54 | |
| 1865 | VLCDR1 (IMGT) | RSLLHSDGKTY |
| | Ab54 | |
| 1866 | VLCDR2 (IMGT) | ELS |
| | Ab54 | |
| 1867 | VLCDR3 (IMGT) | MQYIEAPLT |
| | Ab54 | |
| 1868 | VHCDR1 (IMGT) | GFTFSSYA |
| | Ab55 | |
| 1869 | VHCDR2 (IMGT) | ISYDGSNK |
| | Ab55 | |
| 1870 | VHCDR3 (IMGT) | VRGAGTGFTYGPDGFDI |
| | Ab55 | |
| 1871 | VLCDR1 (IMGT) | RSLLHSDGKTY |
| | Ab55 | |
| 1872 | VLCDR2 (IMGT) | ELS |
| | Ab55 | |
| 1873 | VLCDR3 (IMGT) | MQYIEAPLT |
| | Ab55 | |
| 1874 | VHCDR1 (IMGT) | GFTFSSYA |
| | Ab56 | |
| 1875 | VHCDR2 (IMGT) | ISYDGSNK |
| | Ab56 | |
| 1876 | VHCDR3 (IMGT) | VRGAGMGLTYGPDGFDI |
| | Ab56 | |
| 1877 | VLCDR1 (IMGT) | RSLLHSDGKTY |
| | Ab56 | |
| 1878 | VLCDR2 (IMGT) | ELS |
| | Ab56 | |
| 1879 | VLCDR3 (IMGT) | MQYIEAPLT |
| | Ab56 | |
| 1880 | VHCDR1 (IMGT) | GFTFSSYA |
| | Ab57 | |
| 1881 | VHCDR2 (IMGT) | ISYDGSNK |
| | Ab57 | |
| 1882 | VHCDR3 (IMGT) | VRGAGLGFPYGPDGFDI |
| | Ab57 | |
| 1883 | VLCDR1 (IMGT) | RSLLHSDGKTY |
| | Ab57 | |
| 1884 | VLCDR2 (IMGT) | ELS |
| | Ab57 | |
| 1885 | VLCDR3 (IMGT) | MQYIEAPLT |
| | Ab57 | |
| 1886 | VHCDR1 (IMGT) | GFTFSSYA |
| | Ab58 | |
| 1887 | VHCDR2 (IMGT) | ISYDGSNK |
| | Ab58 | |
| 1888 | VHCDR3 (IMGT) | VRGAGLGWAYGPDGFDI |
| | Ab58 | |
| 1889 | VLCDR1 (IMGT) | RSLLHSDGKTY |
| | Ab58 | |
| 1890 | VLCDR2 (IMGT) | ELS |
| | Ab58 | |
| 1891 | VLCDR3 (IMGT) | MQYIEAPLT |
| | Ab58 | |
| 1892 | VHCDR1 (IMGT) | GFTFSSYA |
| | Ab59 | |
| 1893 | VHCDR2 (IMGT) | ISYDGSNK |
| | Ab59 | |
| 1894 | VHCDR3 (IMGT) | VRGAGRGYPYGPDGFDI |
| | Ab59 | |
| 1895 | VLCDR1 (IMGT) | RSLLHSDGKTY |
| | Ab59 | |
| 1896 | VLCDR2 (IMGT) | ELS |
| | Ab59 | |
| 1897 | VLCDR3 (IMGT) | MQYIEAPLT |
| | Ab59 | |
| 1898 | VHCDR1 (IMGT) | GFDFAGYA |
| | Ab60 | |
| 1899 | VHCDR2 (IMGT) | ISYDGSNK |
| | Ab60 | |
| 1900 | VHCDR3 (IMGT) | VRGAGRGLTYGPDGFDI |
| | Ab60 | |
| 1901 | VLCDR1 (IMGT) | RSLLHSDGKTY |
| | Ab60 | |
| 1902 | VLCDR2 (IMGT) | ELS |
| | Ab60 | |
| 1903 | VLCDR3 (IMGT) | MQYIEAPLT |
| | Ab60 | |
| 1904 | VHCDR1 (IMGT) | GFTFSSYA |
| | Ab61 | |
| 1905 | VHCDR2 (IMGT) | ISYDGSNK |
| | Ab61 | |
| 1906 | VHCDR3 (IMGT) | VRGAGLGLTYGPDGFDI |
| | Ab61 | |
| 1907 | VLCDR1 (IMGT) | RSLLHSDGKTY |
| | Ab61 | |
| 1908 | VLCDR2 (IMGT) | ELS |
| | Ab61 | |
| 1909 | VLCDR3 (IMGT) | MQYIEAPLT |
| | Ab61 | |
| 1910 | VHCDR1 (IMGT) | GFTFSSYA |
| | Ab62 | |
| 1911 | VHCDR2 (IMGT) | ISYDGSNK |
| | Ab62 | |
| 1912 | VHCDR3 (IMGT) | VRGAGLGYPYGPDGFDI |
| | Ab62 | |
| 1913 | VLCDR1 (IMGT) | RSLLHSDGKTY |
| | Ab62 | |
| 1914 | VLCDR2 (IMGT) | ELS |
| | Ab62 | |
| 1915 | VLCDR3 (IMGT) | MQYIEAPLT |
| | Ab62 | |
| 1916 | VHCDR1 (IMGT) | GFTFSSYA |
| | Ab63 | |
| 1917 | VHCDR2 (IMGT) | ISYDGSNK |
| | Ab63 | |
| 1918 | VHCDR3 (IMGT) | VRGAGRGYPHGPDGFDI |
| | Ab63 | |
| 1919 | VLCDR1 (IMGT) | RSLLHSDGKTY |
| | Ab63 | |
| 1920 | VLCDR2 (IMGT) | ELS |
| | Ab63 | |
| 1921 | VLCDR3 (IMGT) | MQYIEAPLT |
| | Ab63 | |
| 1922 | VHCDR1 (IMGT) | GFTFSSYA |
| | Ab64 | |
| 1923 | VHCDR2 (IMGT) | ISYDGSNK |
| | Ab64 | |
| 1924 | VHCDR3 (IMGT) | VRGAGIGYPHGPDGFDI |
| | Ab64 | |
| 1925 | VLCDR1 (IMGT) | RSLLHSDGKTY |
| | Ab64 | |
| 1926 | VLCDR2 (IMGT) | ELS |
| | Ab64 | |
| 1927 | VLCDR3 (IMGT) | MQYIEAPLT |
| | Ab64 | |
| 1928 | VHCDR1 (IMGT) | GFTFSSYA |
| | Ab65 | |
| 1929 | VHCDR2 (IMGT) | ISYDGSNK |
| | Ab65 | |
| 1930 | VHCDR3 (IMGT) | VRGAGRGYPYGPDGFDI |
| | Ab65 | |
| 1931 | VLCDR1 (IMGT) | RSLLHSDGKTY |
| | Ab65 | |
| 1932 | VLCDR2 (IMGT) | ELS |
| | Ab65 | |
| 1933 | VLCDR3 (IMGT) | MQYIEAPLT |
| | Ab65 | |
| 1934 | VHCDR1 (IMGT) | GFTFSSYA |
| | Ab66 | |
| 1935 | VHCDR2 (IMGT) | ISYDGSNK |
| | Ab66 | |
| 1936 | VHCDR3 (IMGT) | VRGAGLGFPFGPDGFDI |
| | Ab66 | |
| 1937 | VLCDR1 (IMGT) | RSLLHSDGKTY |
| | Ab66 | |
| 1938 | VLCDR2 (IMGT) | ELS |
| | Ab66 | |
| 1939 | VLCDR3 (IMGT) | MQYIEAPLT |
| | Ab66 | |
| 1940 | VHCDR1 (IMGT) | GFTFSSYA |
| | Ab67 | |
| 1941 | VHCDR2 (IMGT) | ISYDGSNK |
| | Ab67 | |
| 1942 | VHCDR3 (IMGT) | VRGAGRGFPYGPDGFDI |
| | Ab67 | |
| 1943 | VLCDR1 (IMGT) | RSLLHSDGKTY |
| | Ab67 | |
| 1944 | VLCDR2 (IMGT) | ELS |
| | Ab67 | |
| 1945 | VLCDR3 (IMGT) | MQYIEAPLT |
| | Ab67 | |
| 1946 | VHCDR1 (IMGT) | GFTFSSYA |
| | Ab68 | |
| 1947 | VHCDR2 (IMGT) | ISYDGSNK |
| | Ab68 | |
| 1948 | VHCDR3 (IMGT) | VRGAGLGYPNGPDGFDI |
| | Ab68 | |
| 1949 | VLCDR1 (IMGT) | RSLLHSDGKTY |
| | Ab68 | |
| 1950 | VLCDR2 (IMGT) | ELS |
| | Ab68 | |
| 1951 | VLCDR3 (IMGT) | MQYIEAPLT |
| | Ab68 | |
| 1952 | VHCDR1 (IMGT) | GFTFSSYA |
| | Ab69 | |
| 1953 | VHCDR2 (IMGT) | ISYDGSNK |
| | Ab69 | |
| 1954 | VHCDR3 (IMGT) | VRGAGQGFPYGPDGFDI |
| | Ab69 | |
| 1955 | VLCDR1 (IMGT) | RSLLHSDGKTY |
| | Ab69 | |
| 1956 | VLCDR2 (IMGT) | ELS |
| | Ab69 | |
| 1957 | VLCDR3 (IMGT) | MQYIEAPLT |
| | Ab69 | |
| 1958 | VHCDR1 (IMGT) | GFTFSSYA |
| | Ab70 | |
| 1959 | VHCDR2 (IMGT) | ISYDGSNK |
| | Ab70 | |
| 1960 | VHCDR3 (IMGT) | VRGAGQGYPYGPDGFDI |
| | Ab70 | |
| 1961 | VLCDR1 (IMGT) | RSLLHSDGKTY |
| | Ab70 | |
| 1962 | VLCDR2 (IMGT) | ELS |
| | Ab70 | |
| 1963 | VLCDR3 (IMGT) | MQYIEAPLT |
| | Ab70 | |
| 1964 | VHCDR1 (IMGT) | GFTFSSYA |
| | Ab71 | |
| 1965 | VHCDR2 (IMGT) | ISYDGSNK |
| | Ab71 | |
| 1966 | VHCDR3 (IMGT) | VRGAGTGFTYGPDGFDI |
| | Ab71 | |
| 1967 | VLCDR1 (IMGT) | RSLLHSDGKTY |
| | Ab71 | |
| 1968 | VLCDR2 (IMGT) | ELS |
| | Ab71 | |
| 1969 | VLCDR3 (IMGT) | MQYIEAPLT |
| | Ab71 | |
| 1970 | VHCDR1 (IMGT) | GFTFSSYA |
| | Ab72 | |
| 1971 | VHCDR2 (IMGT) | ISYDGSNK |
| | Ab72 | |
| 1972 | VHCDR3 (IMGT) | VRGAGMGLTYGPDGFDI |
| | Ab72 | |
| 1973 | VLCDR1 (IMGT) | RSLLHSDGKTY |
| | Ab72 | |
| 1974 | VLCDR2 (IMGT) | ELS |
| | Ab72 | |
| 1975 | VLCDR3 (IMGT) | MQYIEAPLT |
| | Ab72 | |
| 1976 | VHCDR1 (IMGT) | GFTFSSYA |
| | Ab73 | |
| 1977 | VHCDR2 (IMGT) | ISYDGSNK |
| | Ab73 | |
| 1978 | VHCDR3 (IMGT) | VRGAGLGFPYGPDGFDI |
| | Ab73 | |
| 1979 | VLCDR1 (IMGT) | RSLLHSDGKTY |
| | Ab73 | |
| 1980 | VLCDR2 (IMGT) | ELS |
| | Ab73 | |
| 1981 | VLCDR3 (IMGT) | MQYIEAPLT |
| | Ab73 | |
| 1982 | VHCDR1 (IMGT) | GFTFSSYA |
| | Ab74 | |
| 1983 | VHCDR2 (IMGT) | ISYDGSNK |
| | Ab74 | |
| 1984 | VHCDR3 (IMGT) | VRGAGLGWAYGPDGFDI |
| | Ab74 | |
| 1985 | VLCDR1 (IMGT) | RSLLHSDGKTY |
| | Ab74 | |
| 1986 | VLCDR2 (IMGT) | ELS |
| | Ab74 | |
| 1987 | VLCDR3 (IMGT) | MQYIEAPLT |
| | Ab74 | |
| 1988 | VHCDR1 (IMGT) | GFTFSSYA |
| | Ab75 | |
| 1989 | VHCDR2 (IMGT) | ISYDGSNK |
| | Ab75 | |
| 1990 | VHCDR3 (IMGT) | VRGAGRGYPYGPDGFDI |
| | Ab75 | |
| 1991 | VLCDR1 (IMGT) | RSLLHSDGKTY |
| | Ab75 | |
| 1992 | VLCDR2 (IMGT) | ELS |
| | Ab75 | |
| 1993 | VLCDR3 (IMGT) | MQYIEAPLT |
| | Ab75 | |
| 1994 | VHCDR1 (IMGT) | GFDFAGYA |
| | Ab76 | |
| 1995 | VHCDR2 (IMGT) | ISYDGSNK |
| | Ab76 | |
| 1996 | VHCDR3 (IMGT) | VRGAGRGLTYGPDGFDI |
| | Ab76 | |
| 1997 | VLCDR1 (IMGT) | RSLLHSDGKTY |
| | Ab76 | |
| 1998 | VLCDR2 (IMGT) | ELS |
| | Ab76 | |
| 1999 | VLCDR3 (IMGT) | MQYIEAPLT |
| | Ab76 | |
| 2000 | VHCDR1 (IMGT) | GFTFSSYA |
| | Ab77 | |
| 2001 | VHCDR2 (IMGT) | ISYDGSNK |
| | Ab77 | |
| 2002 | VHCDR3 (IMGT) | VRGAGLGLTYGPDGFDI |
| | Ab77 | |
| 2003 | VLCDR1 (IMGT) | RSLLHSDGKTY |
| | Ab77 | |
| 2004 | VLCDR2 (IMGT) | ELS |
| | Ab77 | |
| 2005 | VLCDR3 (IMGT) | MQYIEAPLT |
| | Ab77 | |
| 2006 | VHCDR1 (IMGT) | GFTFSSYA |
| | Ab78 | |
| 2007 | VHCDR2 (IMGT) | ISYDGSNK |
| | Ab78 | |
| 2008 | VHCDR3 (IMGT) | VRGAGLGYPYGPDGFDI |
| | Ab78 | |
| 2009 | VLCDR1 (IMGT) | RSLLHSDGKTY |
| | Ab78 | |
| 2010 | VLCDR2 (IMGT) | ELS |
| | Ab78 | |
| 2011 | VLCDR3 (IMGT) | MQYIEAPLT |
| | Ab78 | |
| 2012 | VHCDR1 (IMGT) | GFTFSSYA |
| | Ab79 | |
| 2013 | VHCDR2 (IMGT) | ISYDGSNK |
| | Ab79 | |
| 2014 | VHCDR3 (IMGT) | VRGAGRGYPHGPDGFDI |
| | Ab79 | |
| 2015 | VLCDR1 (IMGT) | RSLLHSDGKTY |
| | Ab79 | |
| 2016 | VLCDR2 (IMGT) | ELS |
| | Ab79 | |
| 2017 | VLCDR3 (IMGT) | MQYIEAPLT |
| | Ab79 | |
| 2018 | VHCDR1 (IMGT) | GFTFSSYA |
| | Ab80 | |
| 2019 | VHCDR2 (IMGT) | ISYDGSNK |
| | Ab80 | |
| 2020 | VHCDR3 (IMGT) | VRGAGIGYPHGPDGFDI |
| | Ab80 | |
| 2021 | VLCDR1 (IMGT) | RSLLHSDGKTY |
| | Ab80 | |
| 2022 | VLCDR2 (IMGT) | ELS |
| | Ab80 | |
| 2023 | VLCDR3 (IMGT) | MQYIEAPLT |
| | Ab80 | |
| 2024 | VHCDR1 (IMGT) | GFTFSSYA |
| | Ab81 | |
| 2025 | VHCDR2 (IMGT) | ISYDGSNK |
| | Ab81 | |
| 2026 | VHCDR3 (IMGT) | VRGAGRGYPYGPDGFDI |
| | Ab81 | |
| 2027 | VLCDR1 (IMGT) | RSLLHSDGKTY |
| | Ab81 | |
| 2028 | VLCDR2 (IMGT) | ELS |
| | Ab81 | |
| 2029 | VLCDR3 (IMGT) | MQYIEAPLT |
| | Ab81 | |
| 2030 | VHCDR1 (IMGT) | GFTFSSYA |
| | Ab82 | |
| 2031 | VHCDR2 (IMGT) | ISYDGSNK |
| | Ab82 | |
| 2032 | VHCDR3 (IMGT) | VRGAGLGFPFGPDGFDI |
| | Ab82 | |
| 2033 | VLCDR1 (IMGT) | RSLLHSDGKTY |
| | Ab82 | |
| 2034 | VLCDR2 (IMGT) | ELS |
| | Ab82 | |
| 2035 | VLCDR3 (IMGT) | MQYIEAPLT |
| | Ab82 | |
| 2036 | VHCDR1 (IMGT) | GFTFSSYA |
| | Ab83 | |
| 2037 | VHCDR2 (IMGT) | ISYDGSNK |
| | Ab83 | |
| 2038 | VHCDR3 (IMGT) | VRGAGRGFPYGPDGFDI |
| | Ab83 | |
| 2039 | VLCDR1 (IMGT) | RSLLHSDGKTY |
| | Ab83 | |
| 2040 | VLCDR2 (IMGT) | ELS |
| | Ab83 | |
| 2041 | VLCDR3 (IMGT) | MQYIEAPLT |
| | Ab83 | |
| 2042 | VHCDR1 (IMGT) | GFTFSSYA |
| | Ab84 | |
| 2043 | VHCDR2 (IMGT) | ISYDGSNK |
| | Ab84 | |
| 2044 | VHCDR3 (IMGT) | VRGAGLGYPNGPDGFDI |
| | Ab84 | |
| 2045 | VLCDR1 (IMGT) | RSLLHSDGKTY |
| | Ab84 | |
| 2046 | VLCDR2 (IMGT) | ELS |
| | Ab84 | |
| 2047 | VLCDR3 (IMGT) | MQYIEAPLT |
| | Ab84 | |
| 2048 | VHCDR1 (IMGT) | GFTFSSYA |
| | Ab85 | |
| 2049 | VHCDR2 (IMGT) | ISYDGSNK |
| | Ab85 | |
| 2050 | VHCDR3 (IMGT) | VRGAGQGFPYGPDGFDI |
| | Ab85 | |
| 2051 | VLCDR1 (IMGT) | RSLLHSDGKTY |
| | Ab85 | |
| 2052 | VLCDR2 (IMGT) | ELS |
| | Ab85 | |
| 2053 | VLCDR3 (IMGT) | MQYIEAPLT |
| | Ab85 | |
| 2054 | VHCDR1 (IMGT) | GFTFSSYA |
| | Ab86 | |
| 2055 | VHCDR2 (IMGT) | ISYDGSNK |
| | Ab86 | |
| 2056 | VHCDR3 (IMGT) | VRGAGRGLTYGPDGFDI |
| | Ab86 | |
| 2057 | VLCDR1 (IMGT) | RSLLWSDGKTY |
| | Ab86 | |
| 2058 | VLCDR2 (IMGT) | ELS |
| | Ab86 | |
| 2059 | VLCDR3 (IMGT) | MQYIEAPLT |
| | Ab86 | |
| 2060 | VHCDR1 (IMGT) | GFTFSSYA |
| | Ab87 | |
| 2061 | VHCDR2 (IMGT) | ISYDGSNK |
| | Ab87 | |
| 2062 | VHCDR3 (IMGT) | VRGAGRGFTWGPDGFDI |
| | Ab87 | |
| 2063 | VLCDR1 (IMGT) | RSLLHSDGKTY |
| | Ab87 | |
| 2064 | VLCDR2 (IMGT) | ELS |
| | Ab87 | |
| 2065 | VLCDR3 (IMGT) | MQYVEAPLT |
| | Ab87 | |
| 2066 | VHCDR1 (IMGT) | GFTFSSYA |
| | Ab88 | |
| 2067 | VHCDR2 (IMGT) | ISYDGSNK |
| | Ab88 | |
| 2068 | VHCDR3 (IMGT) | VRGAGRGLTYGPDGFDI |
| | Ab88 | |
| 2069 | VLCDR1 (IMGT) | RSLLHSDGKTY |
| | Ab88 | |
| 2070 | VLCDR2 (IMGT) | ELS |
| | Ab88 | |
| 2071 | VLCDR3 (IMGT) | MQYIEAPLT |
| | Ab88 | |
| 2072 | VHCDR1 (IMGT) | GFTFSSYA |
| | Ab89 | |
| 2073 | VHCDR2 (IMGT) | ISYDGSNK |
| | Ab89 | |
| 2074 | VHCDR3 (IMGT) | VRGAGRGFPYGPDGFDI |
| | Ab89 | |
| 2075 | VLCDR1 (IMGT) | RSLLHSDGKTY |
| | Ab89 | |
| 2076 | VLCDR2 (IMGT) | ELS |
| | Ab89 | |
| 2077 | VLCDR3 (IMGT) | MQYIEVPLT |
| | Ab89 | |
| 2078 | VHCDR1 (IMGT) | GFTFSSYA |
| | Ab90 | |
| 2079 | VHCDR2 (IMGT) | ISYDGSNK |
| | Ab90 | |
| 2080 | VHCDR3 (IMGT) | VRGAGRGYPYGPDGFDI |
| | Ab90 | |
| 2081 | VLCDR1 (IMGT) | RSLLHSDGKTY |
| | Ab90 | |
| 2082 | VLCDR2 (IMGT) | ELS |
| | Ab90 | |
| 2083 | VLCDR3 (IMGT) | MQYVEVPLT |
| | Ab90 | |
| 2084 | VHCDR1 (IMGT) | GFTFSSYA |
| | Ab91 | |
| 2085 | VHCDR2 (IMGT) | ISYDGSNK |
| | Ab91 | |
| 2086 | VHCDR3 (IMGT) | VRGAGQGYMHGPDGFDI |
| | Ab91 | |
| 2087 | VLCDR1 (IMGT) | RSLLWSDGKTY |
| | Ab91 | |
| 2088 | VLCDR2 (IMGT) | ELS |
| | Ab91 | |
| 2089 | VLCDR3 (IMGT) | MQYIEAPLT |
| | Ab91 | |
| 2090 | VHCDR1 (IMGT) | GFTFSSYA |
| | Ab92 | |
| 2091 | VHCDR2 (IMGT) | ISYDGSNK |
| | Ab92 | |
| 2092 | VHCDR3 (IMGT) | VRGAGHGFPTGPDGFDI |
| | Ab92 | |
| 2093 | VLCDR1 (IMGT) | RSLLHSDGKTY |
| | Ab92 | |
| 2094 | VLCDR2 (IMGT) | ELS |
| | Ab92 | |
| 2095 | VLCDR3 (IMGT) | MQYVEAPLT |
| | Ab92 | |
| 2096 | VHCDR1 (IMGT) | GFTFSSYA |
| | Ab93 | |
| 2097 | VHCDR2 (IMGT) | ISYDGSNK |
| | Ab93 | |
| 2098 | VHCDR3 (IMGT) | VRGAGLGFPYGPDGFDI |
| | Ab93 | |
| 2099 | VLCDR1 (IMGT) | RSLLHSDGKTY |
| | Ab93 | |
| 2100 | VLCDR2 (IMGT) | ELS |
| | Ab93 | |
| 2101 | VLCDR3 (IMGT) | MQYIEAPLT |
| | Ab93 | |
| 2102 | VHCDR1 (IMGT) | GFTFSSYA |
| | Ab94 | |
| 2103 | VHCDR2 (IMGT) | ISYDGSNK |
| | Ab94 | |
| 2104 | VHCDR3 (IMGT) | VRGAGLGWPYGPDGFDI |
| | Ab94 | |
| 2105 | VLCDR1 (IMGT) | RSLLHSDGKTY |
| | Ab94 | |
| 2106 | VLCDR2 (IMGT) | ELS |
| | Ab94 | |
| 2107 | VLCDR3 (IMGT) | MQYIEAPLT |
| | Ab94 | |
| 2108 | VHCDR1 (IMGT) | GFTFSSYA |
| | Ab95 | |
| 2109 | VHCDR2 (IMGT) | ISYDGSNK |
| | Ab95 | |
| 2110 | VHCDR3 (IMGT) | VRGAGLGWPYGPDGFDI |
| | Ab95 | |
| 2111 | VLCDR1 (IMGT) | RSLLHSDGKTY |
| | Ab95 | |
| 2112 | VLCDR2 (IMGT) | ELS |
| | Ab95 | |
| 2113 | VLCDR3 (IMGT) | MQYIEAPLT |
| | Ab95 | |
| 2114 | VHCDR1 (IMGT) | GFTFSSYA |
| | Ab96 | |
| 2115 | VHCDR2 (IMGT) | ISYDGSNK |
| | Ab96 | |
| 2116 | VHCDR3 (IMGT) | VRGAGLGWPYGPDGFDI |
| | Ab96 | |
| 2117 | VLCDR1 (IMGT) | RSLLHSDGKTY |
| | Ab96 | |
| 2118 | VLCDR2 (IMGT) | ELS |
| | Ab96 | |
| 2119 | VLCDR3 (IMGT) | MQYIEAPLT |
| | Ab96 | |
| 2120 | VHCDR1 (IMGT) | GFTFSSYA |
| | Ab97 | |
| 2121 | VHCDR2 (IMGT) | ISYDGSNK |
| | Ab97 | |
| 2122 | VHCDR3 (IMGT) | VRGAGLGWPYGPDGFDI |
| | Ab97 | |
| 2123 | VLCDR1 (IMGT) | RSLLHSDGKTY |
| | Ab97 | |
| 2124 | VLCDR2 (IMGT) | ELS |
| | Ab97 | |
| 2125 | VLCDR3 (IMGT) | MQYVEAPLT |
| | Ab97 | |
| 2126 | VHCDR1 (IMGT) | GFTFSSYA |
| | Ab98 | |
| 2127 | VHCDR2 (IMGT) | ISYDGSNK |
| | Ab98 | |
| 2128 | VHCDR3 (IMGT) | VRGAGLGWPYGPDGFDI |
| | Ab98 | |
| 2129 | VLCDR1 (IMGT) | RSLLHSDGKTY |
| | Ab98 | |
| 2130 | VLCDR2 (IMGT) | ELS |
| | Ab98 | |
| 2131 | VLCDR3 (IMGT) | MQYVEVPLT |
| | Ab98 | |
| 2132 | VHCDR1 (IMGT) | GFTFSSYA |
| | Ab99 | |
| 2133 | VHCDR2 (IMGT) | ISYDGSNK |
| | Ab99 | |
| 2134 | VHCDR3 (IMGT) | VRGAGLGWPYGPDGFDI |
| | Ab99 | |
| 2135 | VLCDR1 (IMGT) | RSLLWSDGKTY |
| | Ab99 | |
| 2136 | VLCDR2 (IMGT) | ELS |
| | Ab99 | |
| 2137 | VLCDR3 (IMGT) | MQYIEAPLT |
| | Ab99 | |
| 2138 | VHCDR1 (IMGT) | GFTFSSYA |
| | Ab100 | |
| 2139 | VHCDR2 (IMGT) | ISYDGSNK |
| | Ab100 | |
| 2140 | VHCDR3 (IMGT) | VRGAGLGWPYGPDGFDI |
| | Ab100 | |
| 2141 | VLCDR1 (IMGT) | RSLLWSDGKTY |
| | Ab100 | |
| 2142 | VLCDR2 (IMGT) | ELS |
| | Ab100 | |
| 2143 | VLCDR3 (IMGT) | MQYVEAPLT |
| | Ab100 | |
| 2144 | VHCDR1 (IMGT) | GFTFSSYA |
| | Ab101 | |
| 2145 | VHCDR2 (IMGT) | ISYDGSNK |
| | Ab101 | |
| 2146 | VHCDR3 (IMGT) | VRGAGRGFTLGPDGFDI |
| | Ab101 | |
| 2147 | VLCDR1 (IMGT) | RSLLHSDGKTY |
| | Ab101 | |
| 2148 | VLCDR2 (IMGT) | ELS |
| | Ab101 | |
| 2149 | VLCDR3 (IMGT) | MQYIEAPLT |
| | Ab101 | |
| 2150 | VHCDR1 (IMGT) | GFTFSSYA |
| | Ab102 | |
| 2151 | VHCDR2 (IMGT) | ISYDGSNK |
| | Ab102 | |
| 2152 | VHCDR3 (IMGT) | VRGAGRGFTLGPDGFDI |
| | Ab102 | |
| 2153 | VLCDR1 (IMGT) | RSLLHSDGKTY |
| | Ab102 | |
| 2154 | VLCDR2 (IMGT) | ELS |
| | Ab102 | |
| 2155 | VLCDR3 (IMGT) | MQYIEAPLT |
| | Ab102 | |
| 2156 | VHCDR1 (IMGT) | GFTFSSYA |
| | Ab103 | |
| 2157 | VHCDR2 (IMGT) | ISYDGSNK |
| | Ab103 | |
| 2158 | VHCDR3 (IMGT) | VRGAGRGFTLGPDGFDI |
| | Ab103 | |
| 2159 | VLCDR1 (IMGT) | RSLLHSDGKTY |
| | Ab103 | |
| 2160 | VLCDR2 (IMGT) | ELS |
| | Ab103 | |
| 2161 | VLCDR3 (IMGT) | MQYIEAPLT |
| | Ab103 | |
| 2162 | VHCDR1 (IMGT) | GFTFSSYA |
| | Ab104 | |
| 2163 | VHCDR2 (IMGT) | ISYDGSNK |
| | Ab104 | |
| 2164 | VHCDR3 (IMGT) | VRGAGRGFTLGPDGFDI |
| | Ab104 | |
| 2165 | VLCDR1 (IMGT) | RSLLHSDGKTY |
| | Ab104 | |
| 2166 | VLCDR2 (IMGT) | ELS |
| | Ab104 | |
| 2167 | VLCDR3 (IMGT) | MQYVEAPLT |
| | Ab104 | |
| 2168 | VHCDR1 (IMGT) | GFTFSSYA |
| | Ab105 | |
| 2169 | VHCDR2 (IMGT) | ISYDGSNK |
| | Ab105 | |
| 2170 | VHCDR3 (IMGT) | VRGAGRGFTLGPDGFDI |
| | Ab105 | |
| 2171 | VLCDR1 (IMGT) | RSLLHSDGKTY |
| | Ab105 | |
| 2172 | VLCDR2 (IMGT) | ELS |
| | Ab105 | |
| 2173 | VLCDR3 (IMGT) | MQYVEVPLT |
| | Ab105 | |
| 2174 | VHCDR1 (IMGT) | GFTFSSYA |
| | Ab106 | |
| 2175 | VHCDR2 (IMGT) | ISYDGSNK |
| | Ab106 | |
| 2176 | VHCDR3 (IMGT) | VRGAGRGFTLGPDGFDI |
| | Ab106 | |
| 2177 | VLCDR1 (IMGT) | RSLLWSDGKTY |
| | Ab106 | |
| 2178 | VLCDR2 (IMGT) | ELS |
| | Ab106 | |
| 2179 | VLCDR3 (IMGT) | MQYIEAPLT |
| | Ab106 | |
| 2180 | VHCDR1 (IMGT) | GFTFSSYA |
| | Ab107 | |
| 2181 | VHCDR2 (IMGT) | ISYDGSNK |
| | Ab107 | |
| 2182 | VHCDR3 (IMGT) | VRGAGRGFTLGPDGFDI |
| | Ab107 | |
| 2183 | VLCDR1 (IMGT) | RSLLWSDGKTY |
| | Ab107 | |
| 2184 | VLCDR2 (IMGT) | ELS |
| | Ab107 | |
| 2185 | VLCDR3 (IMGT) | MQYVEAPLT |
| | Ab107 | |
| 2186 | VHCDR1 (IMGT) | GFTFSSYA |
| | Vh1 | |
| 2187 | VHCDR2 (IMGT) | ISYDGSNK |
| | Vh1 | |
| 2188 | VHCDR3 (IMGT) | VRGAGRGYTYGPDGFDI |
| | Vh1 | |
| 2189 | VHCDR1 (IMGT) | GFTFSSYA |
| | Vh2 | |
| 2190 | VHCDR2 (IMGT) | ISYDGSNK |
| | Vh2 | |
| 2191 | VHCDR3 (IMGT) | ARGAGRGYTYGPDGFDI |
| | Vh2 | |
| 2192 | VLCDR1 (IMGT) | RSLLHSDGKTY |
| | Vk1 | |
| 2193 | VLCDR2 (IMGT) | ELS |
| | Vk1 | |
| 2194 | VLCDR3 (IMGT) | MQYIEAPLT |
| | Vk1 | |
| 2195 | VLCDR1 (IMGT) | RSLLHSDGKTY |
| | Vk2 | |
| 2196 | VLCDR2 (IMGT) | ELS |
| | Vk2 | |
| 2197 | VLCDR3 (IMGT) | MQYIEAPLT |
| | Vk2 | |
| 2198 | VLCDR1 (IMGT) | RSLLHSDGKTY |
| | Vk3 | |
| 2199 | VLCDR2 (IMGT) | ELS |
| | Vk3 | |
| 2200 | VLCDR3 (IMGT) | MQYIEAPLT |
| | Vk3 | |
| 2201 | VLCDR1 (IMGT) | RSLLHSDGKTY |
| | Vk4 | |
| 2202 | VLCDR2 (IMGT) | ELS |
| | Vk4 | |
| 2203 | VLCDR3 (IMGT) | MQYIEAPLT |
| | Vk4 | |
| 2204 | VLCDR1 (IMGT) | RSLLHSDGKTY |
| | Vk5 | |
| 2205 | VLCDR2 (IMGT) | ELS |
| | Vk5 | |
| 2206 | VLCDR3 (IMGT) | MQYIEAPLT |
| | Vk5 | |
| 2207 | VLCDR1 (IMGT) | QSLLHSDGKTY |
| | Vk6 | |
| 2208 | VLCDR2 (IMGT) | ELS |
| | Vk6 | |
| 2209 | VLCDR3 (IMGT) | MQYIEAPLT |
| | Vk6 | |
| 2210 | VLCDR1 (IMGT) | QSLLHSDGKTY |
| | Vk7 | |
| 2211 | VLCDR2 (IMGT) | ELS |
| | Vk7 | |
| 2212 | VLCDR3 (IMGT) | MQYIEAPLT |
| | Vk7 | |
| 2213 | VLCDR1 (IMGT) | RSLLHSDGKTY |
| | Vk8 | |
| 2214 | VLCDR2 (IMGT) | YLG |
| | Vk8 | |
| 2215 | VLCDR3 (IMGT) | MQYIEAPLT |
| | Vk8 | |
| 2216 | VLCDR1 (IMGT) | QSLLHSDGKTY |
| | Vk9 | |
| 2217 | VLCDR2 (IMGT) | ELS |
| | Vk9 | |
| 2218 | VLCDR3 (IMGT) | MQYIEAPLT |
| | Vk9 | |
| 2219 | VLCDR1 (IMGT) | RSLLHSDGKTY |
| | Vk10 | |
| 2220 | VLCDR2 (IMGT) | ELS |
| | Vk10 | |
| 2221 | VLCDR3 (IMGT) | MQYIEAPLT |
| | Vk10 | |
| 2222 | VLCDR1 (IMGT) | RSLLHSDGKTY |
| | Vk11 | |
| 2223 | VLCDR2 (IMGT) | ELS |
| | Vk11 | |
| 2224 | VLCDR3 (IMGT) | MQYIEAPLT |
| | Vk11 | |
| 2225 | VLCDR1 (IMGT) | RSLLHSDGKTY |
| | Vk12 | |
| 2226 | VLCDR2 (IMGT) | ELS |
| | Vk12 | |
| 2227 | VLCDR3 (IMGT) | MQYIEAPLT |
| | Vk12 | |
| 2228 | VLCDR1 (IMGT) | RSLLHSDGKTY |
| | Vk13 | |
| 2229 | VLCDR2 (IMGT) | ELS |
| | Vk13 | |
| 2230 | VLCDR3 (IMGT) | MQYIEAPLT |
| | Vk13 | |
| 2231 | Consensus #1 | [SGHT][YH]A[MI]H |
| | VHCDR1 | |
| 2232 | Consensus #1 | [VL]ISYDGS[NE]KYYADS[VA]KG |
| | VHCDR2 | |
| 2233 | Consensus #1 | GAG[RTLQHMI]G[YLFW][TPASIM][YNFHLWRK]GPDGDFI |
| | VHCDR3 | |
| 2234 | Consensus #1 | [TRK]SS[RQE]SL[LVI][HWYF][SRGT]DG[KNI]TY[VL][YSN] |
| | VLCDR1 | |
| 2235 | Consensus #1 | [EKQ][LVI]S[NS]RFS |
| | VLCDR2 | |
| 2236 | Consensus #1 | MQ[YA][IVTK][EQNR][AFL]P[LW]T |
| | VLCDR3 | |
| 2237 | Consensus #2 | [SG]YA[MI]H |
| | VHCDR1 | |
| 2238 | Consensus #2 | [VL]ISYDGSNKYYADS[VA]KG |
| | VHCDR2 | |
| 2239 | Consensus #2 | GAG[RTLQHMI]G[YLFW][TPASIM][YNFHLWRK]GPDGDFI |
| | VHCDR3 | |
| 2240 | Consensus #2 | [TRK]SS[RQE]SL[LV][HWY][SR]DG[KN]TY[VL][YS] |
| | VLCDR1 | |
| 2241 | Consensus #2 | [EK][LV]SNRFS |
| | VLCDR2 | |
| 2242 | Consensus #2 | MQ[YA][IVT][EQ][AF]P[LW]T |
| | VLCDR3 | |
| 2243 | Consensus #3 | [SG]YAMH |
| | VHCDR1 | |
| 2244 | Consensus #3 | VISYDGSNKYYADSVKG |
| | VHCDR2 | |
| 2245 | Consensus #3 | GAG[RTLQHMI]G[YLFW][TPASIM][YNFHLWRK]GPDGDFI |
| | VHCDR3 | |
| 2246 | Consensus #3 | [TRK]SS[RQ]SLL[HW]SDGKTY[VL]Y |
| | VLCDR1 | |
| 2247 | Consensus #3 | ELSNRFS |
| | VLCDR2 | |
| 2248 | Consensus #3 | MQY[IV]EAPLT |
| | VLCDR3 | |
| 2249 | Consensus #1 | GF[TSD]F[SGTA][SGHT][YH]A |
| | VHCDR1 (IMGT) | |
| 2250 | Consensus #1 | ISYDGS[NE]K |
| | VHCDR2 (IMGT) | |
| 2251 | Consensus #1 | VRGAG[RTLQHMI]G[YLFW][TPASIM][YNFHLWRK]GPDGDFI |
| | VHCDR3 (IMGT) | |
| 2252 | Consensus #1 | [RQE]SL[LVI][HWYF][SRGT]DG[KNI]TY |
| | VLCDR1 (IMGT) | |
| 2253 | Consensus #1 | [EKQ][LVI]S |
| | VLCDR2 (IMGT) | |
| 2254 | Consensus #1 | MQ[YA][IVTK][EQNR][AFL]P[LW]T |
| | VLCDR3 (IMGT) | |
| 2255 | Consensus #2 | GF[TD]F[SA][SG]YA |
| | VHCDR1 (IMGT) | |
| 2256 | Consensus #2 | ISYDGSNK |
| | VHCDR2 (IMGT) | |
| 2257 | Consensus #2 | VRGAG[RTLQHMI]G[YLFW][TPASIM][YNFHLWRK]GPDGDFI |
| | VHCDR3 (IMGT) | |
| 2258 | Consensus #2 | [RQE]SL[LV][HWY][SR]DG[KN]TY |
| | VLCDR1 (IMGT) | |
| 2259 | Consensus #2 | [EK][LV]S |
| | VLCDR2 (IMGT) | |
| 2260 | Consensus #2 | MQ[YA][IVT][EQ][AF]P[LW]T |
| | VLCDR3 (IMGT) | |
| 2261 | Consensus #3 | GF[TD]F[SA][SG]YA |
| | VHCDR1 (IMGT) | |
| 2262 | Consensus #3 | ISYDGSNK |
| | VHCDR2 (IMGT) | |
| 2263 | Consensus #3 | VRGAG[RTLQHMI]G[YLFW][TPASIM][YNFHLWRK]GPDGDFI |
| | VHCDR3 (IMGT) | |
| 2264 | Consensus #3 | [RQ]SLL[HW]SDGKTY |
| | VLCDR1 (IMGT) | |
| 2265 | Consensus #3 | ELS |
| | VLCDR2 (IMGT) | |
| 2266 | Consensus #3 | MQY[IV]EAPLT |
| | VLCDR3 (IMGT) | |

### EQUIVALENTS:

[0361] Those skilled in the art will recognize, or be able to ascertain using no more than routine experimentation, many equivalents of the specific embodiments disclosed herein. Such equivalents are intended to be encompassed by the following claims.

The application's sequence listing, which the Patent Office published only in electronic form, follows.

SEQUENCE LISTING (2268 sequences)

SEQ ID NO: 1 - protein, 234 aa, Unknown
  FGFR1 IIIc - human, mouse or cynomolgus
TDNTKPNPVAPYWTSPEKMEKKLHAVPAAKTVKFKCPSSGTPNPTLRWLKNGKEFKPDHRIGGYKVRYATWSIIMDSVVPSDKGNYTCIVENEYGSINHTYQLDVVERSPHRPILQAGLPANKTVALGSNVEFMCKVYSDPQPHIQWLKHIEVNGSKIGPDNLPYVQILKTAGVNTTDKEMEVLHLRNVSFEDAGEYTCLAGNSIGLSHHSAWLTVLEALEERPAVMTSPLYLE

SEQ ID NO: 2 - protein, 234 aa, Rattus norvegicus
TDNTKPNPVAPYWTSPEKMEKKLHAVPAAKTVKFKCPSSGTPSPTLRWLKNGKEFKPDHRIGGYKVRYATWSIIMDSVVPSDKGNYTCIVENEYGSINHTYQLDVVERSPHRPILQAGLPANKTVALGSNVEFMCKVYSDPQPHIQWLKHIEVNGSKIGPDNLPYVQILKTAGVNTTDKEMEVLHLRNVSFEDAGEYTCLAGNSIGLSHHSAWLTVLEALEERPAVMTSPLYLE

SEQ ID NO: 3 - protein, 236 aa, Unknown
  FGFR1 IIIb - human, mouse or cynomolgus
TDNTKPNPVAPYWTSPEKMEKKLHAVPAAKTVKFKCPSSGTPNPTLRWLKNGKEFKPDHRIGGYKVRYATWSIIMDSVVPSDKGNYTCIVENEYGSINHTYQLDVVERSPHRPILQAGLPANKTVALGSNVEFMCKVYSDPQPHIQWLKHIEVNGSKIGPDNLPYVQILKHSGINSSDAEVLTLFNVTEAQSGEYVCKVSNYIGEANQSAWLTVTRPVAKALEERPAVMTSPLYLE

SEQ ID NO: 4 - protein, 236 aa, Rattus norvegicus
TDNTKPNPVAPYWTSPEKMEKKLHAVPAAKTVKFKCPSSGTPSPTLRWLKNGKEFKPDHRIGGYKVRYATWSIIMDSVVPSDKGNYTCIVENEYGSINHTYQLDVVERSPHRPILQAGLPANKTVALGSNVEFMCKVYSDPQPHIQWLKHIEVNGSKIGPDNLPYVQILKHSGINSSDAEVLTLFNVTEAQSGEYVCKVSNYIGEANQSAWLTVTRPVPKALEERPAVMTSPLYLE

SEQ ID NO: 5 - protein, 230 aa, Homo sapiens
SNNKRAPYWTNTEKMEKRLHAVPAANTVKFRCPAGGNPMPTMRWLKNGKEFKQEHRIGGYKVRNQHWSLIMESVVPSDKGNYTCVVENEYGSINHTYHLDVVERSPHRPILQAGLPANASTVVGGDVEFVCKVYSDAQPHIQWIKHVEKNGSKYGPDGLPYLKVLKAAGVNTTDKEIEVLYIRNVTFEDAGEYTCLAGNSIGISFHSAWLTVLPAPGREKEITASPDYLE

SEQ ID NO: 6 - protein, 230 aa, Unknown
  FGFR2 IIIc - mouse or rat
RSNQRAPYWTNTEKMEKRLHAVPAANTVKFRCPAGGNPTPTMRWLKNGKEFKQEHRIGGYKVRNQHWSLIMESVVPSDKGNYTCLVENEYGSINHTYHLDVVERSPHRPILQAGLPANASTVVGGDVEFVCKVYSDAQPHIQWIKHVEKNGSKYGPDGLPYLKVLKAAGVNTTDKEIEVLYIRNVTFEDAGEYTCLAGNSIGISFHSAWLTVLPAPVREKEITASPDYLE

SEQ ID NO: 7 - protein, 230 aa, Macaca fascicularis
GNNKRAPYWTNTEKMEKRLHAVPAANTVKFRCPAGGNPTPTMRWLKNGKEFKQEHRIGGYKVRNQHWSLIMESVVPSDKGNYTCVVENEYGSINHTYHLDVVERSPHRPILQAGLPANASTVVGGDVEFVCKVYSDAQPHIQWIKHVEKNGSKYGPDGLPYLKVLKAAGVNTTDKEIEVLYIRNVTFEDAGEYTCLAGNSIGISFHSAWLTVLPAPGREKEITASPDYLE

SEQ ID NO: 8 - protein, 231 aa, Homo sapiens
SNNKRAPYWTNTEKMEKRLHAVPAANTVKFRCPAGGNPMPTMRWLKNGKEFKQEHRIGGYKVRNQHWSLIMESVVPSDKGNYTCVVENEYGSINHTYHLDVVERSPHRPILQAGLPANASTVVGGDVEFVCKVYSDAQPHIQWIKHVEKNGSKYGPDGLPYLKVLKHSGINSSNAEVLALFNVTEADAGEYICKVSNYIGQANQSAWLTVLPKQQAPGREKEITASPDYLE

SEQ ID NO: 9 - protein, 231 aa, Unknown
  FGFR2 IIIb - mouse or rat
RSNQRAPYWTNTEKMEKRLHAVPAANTVKFRCPAGGNPTPTMRWLKNGKEFKQEHRIGGYKVRNQHWSLIMESVVPSDKGNYTCLVENEYGSINHTYHLDVVERSPHRPILQAGLPANASTVVGGDVEFVCKVYSDAQPHIQWIKHVEKNGSKYGPDGLPYLKVLKHSGINSSNAEVLALFNVTEMDAGEYICKVSNYIGQANQSAWLTVLPKQQAPVREKEITASPDYLE

SEQ ID NO: 10 - protein, 231 aa, Macaca fascicularis
GNNKRAPYWTNTEKMEKRLHAVPAANTVKFRCPAGGNPTPTMRWLKNGKEFKQEHRIGGYKVRNQHWSLIMESVVPSDKGNYTCVVENEYGSINHTYHLDVVERSPHRPILQAGLPANASTVVGGDVEFVCKVYSDAQPHIQWIKHVEKNGSKYGPDGLPYLKVLKHSGINSSNAEVLALFNVTEADAGEYICKVSNYIGQANQSAWLTVLPKQQAPGREKEITASPDYLE

SEQ ID NO: 11 - protein, 232 aa, Homo sapiens
AEDTGVDTGAPYWTRPERMDKKLLAVPAANTVRFRCPAAGNPTPSISWLKNGREFRGEHRIGGIKLRHQQWSLVMESVVPSDRGNYTCVVENKFGSIRQTYTLDVLERSPHRPILQAGLPANQTAVLGSDVEFHCKVYSDAQPHIQWLKHVEVNGSKVGPDGTPYVTVLKTAGANTTDKELEVLSLHNVTFEDAGEYTCLAGNSIGFSHHSAWLVVLPAEEELVEADEAGSV

SEQ ID NO: 12 - protein, 232 aa, Mus musculus
GEDVAEDTGAPYWTRPERMDKKLLAVPAANTVRFRCPAAGNPTPSISWLKNGKEFRGEHRIGGIKLRHQQWSLVMESVVPSDRGNYTCVVENKFGSIRQTYTLDVLERSPHRPILQAGLPANQTAILGSDVEFHCKVYSDAQPHIQWLKHVEVNGSKVGPDGTPYVTVLKTAGANTTDKELEVLSLHNVTFEDAGEYTCLAGNSIGFSHHSAWLVVLPAEEELMETDEAGSV

SEQ ID NO: 13 - protein, 232 aa, Rattus norvegicus
GEDVAEDTGAPYWTRPERMDKKLLAVPAANTVRFRCPAAGNPTPSISWLKNGKEFRGEHRIGGIKLRHQQWSLVMESVVPSDRGNYTCVVENKFGSIRQTYTLDVLERSPHRPILQAGLPANQTAVLGSDVEFHCKVYSDAQPHIQWLKHVEVNGSKVGPDGTPYVTVLKTAGANTTDRELEVLSLHNVTFEDAGEYTCLAGNSIGFSHHSAWLVVLPAEEELMEVDEAGSV

SEQ ID NO: 14 - protein, 232 aa, Macaca fascicularis
AEDTGVDTGAPYWTRPERMDKKLLAVPAANTVRFRCPAAGNPTPSISWLKNGKEFRGEHRIGGIKLRHQQWSLVMESVVPSDRGNYTCVVENKFGSIRQTYTLDVLERSPHRPILQAGLPANQTAVLGSDVEFHCKVYSDAQPHIQWLKHVEVNGSKVGPDGTPYVTVLKTAGANTTDKELEVLSLHNVTFEDAGEYTCLAGNSIGFSHHSAWLVVLPAEEELVEADEAGSV

SEQ ID NO: 15 - protein, 234 aa, Homo sapiens
AEDTGVDTGAPYWTRPERMDKKLLAVPAANTVRFRCPAAGNPTPSISWLKNGREFRGEHRIGGIKLRHQQWSLVMESVVPSDRGNYTCVVENKFGSIRQTYTLDVLERSPHRPILQAGLPANQTAVLGSDVEFHCKVYSDAQPHIQWLKHVEVNGSKVGPDGTPYVTVLKSWISESVEADVRLRLANVSERDGGEYLCRATNFIGVAEKAFWLSVHGPRAAEEELVEADEAGSV

SEQ ID NO: 16 - protein, 234 aa, Mus musculus
GEDVAEDTGAPYWTRPERMDKKLLAVPAANTVRFRCPAAGNPTPSISWLKNGKEFRGEHRIGGIKLRHQQWSLVMESVVPSDRGNYTCVVENKFGSIRQTYTLDVLERSPHRPILQAGLPANQTAILGSDVEFHCKVYSDAQPHIQWLKHVEVNGSKVGPDGTPYVTVLKSWISENVEADARLRLANVSERDGGEYLCRATNFIGVAEKAFWLRVHGPQAAEEELMETDEAGSV

SEQ ID NO: 17 - protein, 234 aa, Rattus norvegicus
GEDVAEDTGAPYWTRPERMDKKLLAVPAANTVRFRCPAAGNPTPSISWLKNGKEFRGEHRIGGIKLRHQQWSLVMESVVPSDRGNYTCVVENKFGSIRQTYTLDVLERSPHRPILQAGLPANQTAVLGSDVEFHCKVYSDAQPHIQWLKHVEVNGSKVGPDGTPYVTVLKSWISENVEADARLRLANVSERDGGEYLCRATNFIGVAEKAFWLRVHGPQAAEEELMEVDEAGSV

SEQ ID NO: 18 - protein, 234 aa, Macaca fascicularis
AEDTGVDTGAPYWTRPERMDKKLLAVPAANTVRFRCPAAGNPTPSISWLKNGKEFRGEHRIGGIKLRHQQWSLVMESVVPSDRGNYTCVVENKFGSIRQTYTLDVLERSPHRPILQAGLPANQTAVLGSDVEFHCKVYSDAQPHIQWLKHVEVNGSKVGPDGTPYVTVLKSWISESVEADVRLRLANVSERDGGEYLCRATNFIGVAEKAFWLSVHRPRAAEEELVEADEAGSV

SEQ ID NO: 19 - protein, 226 aa, Homo sapiens
QQAPYWTHPQRMEKKLHAVPAGNTVKFRCPAAGNPTPTIRWLKDGQAFHGENRIGGIRLRHQHWSLVMESVVPSDRGTYTCLVENAVGSIRYNYLLDVLERSPHRPILQAGLPANTTAVVGSDVELLCKVYSDAQPHIQWLKHIVINGSSFGADGFPYVQVLKTADINSSEVEVLYLRNVSAEDAGEYTCLAGNSIGLSYQSAWLTVLPEEDPTWTAAAPEARYTD

SEQ ID NO: 20 - protein, 226 aa, Mus musculus
QQAPYWTHPQRMEKKLHAVPAGNTVKFRCPAAGNPMPTIHWLKDGQAFHGENRIGGIRLRHQHWSLVMESVVPSDRGTYTCLVENSLGSIRYSYLLDVLERSPHRPILQAGLPANTTAVVGSDVELLCKVYSDAQPHIQWLKHVVINGSSFGADGFPYVQVLKTTDINSSEVEVLYLRNVSAEDAGEYTCLAGNSIGLSYQSAWLTVLPEEDLTWTTATPEARYTD

SEQ ID NO: 21 - protein, 228 aa, Rattus norvegicus
QQAPYWTHPQRMEKKLHAVPAGNTVKFRCPAAGNPMPTIHWLKNGQAFHGENRIGGIRLRHQHWSLVMESVVPSDRGTYTCLVENSLGSIRYSYLLDVLERSPHRPILQAGLPANTTAVVGSNVELLCKVYSDAQPHIQWLKHIVINGSSFGADGFPYVQVLKTTDINSSEVEVLYLRNVSAEDAGEYTCLAGNSIGLSYQSAWLTVLPAEEEDLAWTTATSEARYTD

SEQ ID NO: 22 - protein, 226 aa, Macaca fascicularis
QQAPYWTHPQRMEKKLHAVPAGNTVKFRCPAAGNPTPTIRWLKDGQAFHGENRIGGIRLRHQHWSLVMESVVPSDRGTYTCLVENAVGSIRYNYLLDVLERSPHRPILQAGLPANTTAVVGSDVELLCKVYSDAQPHIQWLKHIVINGSSFGADGFPYVQVLKTADINSSEVEVLYLRNVSAEDAGEYTCLAGNSIGLSYQSAWLTVLPEEDLTWTAATPEARYTD

SEQ ID NO: 23 - protein, 5 aa, Artificial Sequence
  Synthetic: VHCDR1 Ab1
SYAMH

SEQ ID NO: 24 - protein, 17 aa, Artificial Sequence
  Synthetic: VHCDR2 Ab1
VISYDGSNKYYADSVKG

SEQ ID NO: 25 - protein, 15 aa, Artificial Sequence
  Synthetic: VHCDR3 Ab1
GAGRGYTYGPDGFDI

SEQ ID NO: 26 - protein, 16 aa, Artificial Sequence
  Synthetic: VLCDR1 Ab1
RSSQSLVYTDGITYLS

SEQ ID NO: 27 - protein, 7 aa, Artificial Sequence
  Synthetic: VLCDR2 Ab1
EISNRFS

SEQ ID NO: 28 - protein, 9 aa, Artificial Sequence
  Synthetic: VLCDR3 Ab1
MQATQFPWT

SEQ ID NO: 29 - protein, 124 aa, Artificial Sequence
  Synthetic: VH Ab1
EVQLVESGGGLVQPGGSMKLSCVASGFTFSSYAMHWVRQAPGKGLEWVAVISYDGSNKYYADSVKGRFTISRDNAKNTLYLQMNSLRAEDTATYYCVRGAGRGYTYGPDGFDIWGQGTMVTVSS

SEQ ID NO: 30 - protein, 112 aa, Artificial Sequence
  Synthetic: VL Ab1
DIVMTQSPRSLPVTLGQPASISCRSSQSLVYTDGITYLSWLQQRPGQPPRLLIYEISNRFSGVPDRFSGSGAGTDFTLKISRVEAEDVGVYYCMQATQFPWTFGQGTKVDIK

SEQ ID NO: 31 - protein, 263 aa, Artificial Sequence
  Synthetic: VHVL Ab1 (scFv)
EVQLVESGGGLVQPGGSMKLSCVASGFTFSSYAMHWVRQAPGKGLEWVAVISYDGSNKYYADSVKGRFTISRDNAKNTLYLQMNSLRAEDTATYYCVRGAGRGYTYGPDGFDIWGQGTMVTVSSASTGGGGSGGGGGSDIVMTQSPRSLPVTLGQPASISCRSSQSLVYTDGITYLSWLQQRPGQPPRLLIYEISNRFSGVPDRFSGSGAGTDFTLKISRVEAEDVGVYYCMQATQFPWTFGQGTKVDIKRTVAAPSHHHHHH

SEQ ID NO: 32 - protein, 446 aa, Artificial Sequence
  Synthetic: HC Ab1
EVQLVESGGGLVQPGGSMKLSCVASGFTFSSYAMHWVRQAPGKGLEWVAVISYDGSNKYYADSVKGRFTISRDNAKNTLYLQMNSLRAEDTATYYCVRGAGRGYTYGPDGFDIWGQGTMVTVSSKGPSVFPLAPSSRSTSESTAALGCLVKDYFPEPVTVSWNSGALTSGVHTFPAVLQSSGLYSLSSVVTVPSSNFGTQTYTCNVDHKPSNTKVDKTVERKCCVECPPCPAPPVAGPSVFLFPPKPKDTLMISRTPEVTCVVVDVSHEDPEVQFNWYVDGVEVHNAKTKPREEQFNSTFRVVSVLTVVHQDWLNGKEYKCKVSNKGLPAPIEKTISKTKGQPREPQVYTLPPSREEMTKNQVSLTCLVKGFYPSDIAVEWESNGQPENNYKTTPPMLDSDGSFFLYSKLTVDKSRWQQGNVFSCSVMHEALHNHYTQKSLSLSPG

SEQ ID NO: 33 - protein, 219 aa, Artificial Sequence
  Synthetic: LC Ab1
DIVMTQSPRSLPVTLGQPASISCRSSQSLVYTDGITYLSWLQQRPGQPPRLLIYEISNRFSGVPDRFSGSGAGTDFTLKISRVEAEDVGVYYCMQATQFPWTFGQGTKVDIKRTVAAPSVFIFPPSDEQLKSGTASVVCLLNNFYPREAKVQWKVDNALQSGNSQESVTEQDSKDSTYSLSSTLTLSKADYEKHKVYACEVTHQGLSSPVTKSFNRGEC

SEQ ID NO: 34 - protein, 5 aa, Artificial Sequence
  Synthetic: VHCDR1 Ab2
SYAMH

SEQ ID NO: 35 - protein, 17 aa, Artificial Sequence
  Synthetic: VHCDR2 Ab2
LISYDGSNKYYADSVKG

SEQ ID NO: 36 - protein, 15 aa, Artificial Sequence
  Synthetic: VHCDR3 Ab2
GAGRGYTYGPDGFDI

SEQ ID NO: 37 - protein, 11 aa, Artificial Sequence
  Synthetic: VLCDR1 Ab2
RVSQSITNYLN

SEQ ID NO: 38 - protein, 7 aa, Artificial Sequence
  Synthetic: VLCDR2 Ab2
AASSLQS

SEQ ID NO: 39 - protein, 9 aa, Artificial Sequence
  Synthetic: VLCDR3 Ab2
QQSYTTPFT

SEQ ID NO: 40 - protein, 124 aa, Artificial Sequence
  Synthetic: VH Ab2
EVQLLESGGGVVQPGRSLRLSCAASGFTFSSYAMHWVRQAPGKGLEWVALISYDGSNKYYADSVKGRFTISRDNSKNTLYLQMNSLRAEDTAIYYCVRGAGRGYTYGPDGFDIWGQGTMVTVSS

SEQ ID NO: 41 - protein, 107 aa, Artificial Sequence
  Synthetic: VL Ab2
DIVMTQSPSSLSASVGDRVSITCRVSQSITNYLNWYQQKPGGAPKLLIYAASSLQSGVPSRFSGSGSGSQFTLTISSLQAEDFATYYCQQSYTTPFTFGPGTKVEIK

SEQ ID NO: 42 - protein, 267 aa, Artificial Sequence
  Synthetic: VHVL Ab2  (scFv)
EVQLLESGGGVVQPGRSLRLSCAASGFTFSSYAMHWVRQAPGKGLEWVALISYDGSNKYYADSVKGRFTISRDNSKNTLYLQMNSLRAEDTAIYYCVRGAGRGYTYGPDGFDIWGQGTMVTVSSASTGGGGSGGGGSGGGGSGGGGSDIVMTQSPSSLSASVGDRVSITCRVSQSITNYLNWYQQKPGGAPKLLIYAASSLQSGVPSRFSGSGSGSQFTLTISSLQAEDFATYYCQQSYTTPFTFGPGTKVEIKRTVAAPSHHHHHH

SEQ ID NO: 43 - protein, 446 aa, Artificial Sequence
  Synthetic: HC Ab2
EVQLLESGGGVVQPGRSLRLSCAASGFTFSSYAMHWVRQAPGKGLEWVALISYDGSNKYYADSVKGRFTISRDNSKNTLYLQMNSLRAEDTAIYYCVRGAGRGYTYGPDGFDIWGQGTMVTVSSKGPSVFPLAPSSRSTSESTAALGCLVKDYFPEPVTVSWNSGALTSGVHTFPAVLQSSGLYSLSSVVTVPSSNFGTQTYTCNVDHKPSNTKVDKTVERKCCVECPPCPAPPVAGPSVFLFPPKPKDTLMISRTPEVTCVVVDVSHEDPEVQFNWYVDGVEVHNAKTKPREEQFNSTFRVVSVLTVVHQDWLNGKEYKCKVSNKGLPAPIEKTISKTKGQPREPQVYTLPPSREEMTKNQVSLTCLVKGFYPSDIAVEWESNGQPENNYKTTPPMLDSDGSFFLYSKLTVDKSRWQQGNVFSCSVMHEALHNHYTQKSLSLSPG

SEQ ID NO: 44 - protein, 214 aa, Artificial Sequence
  Synthetic: LC Ab2
DIVMTQSPSSLSASVGDRVSITCRVSQSITNYLNWYQQKPGGAPKLLIYAASSLQSGVPSRFSGSGSGSQFTLTISSLQAEDFATYYCQQSYTTPFTFGPGTKVEIKRTVAAPSVFIFPPSDEQLKSGTASVVCLLNNFYPREAKVQWKVDNALQSGNSQESVTEQDSKDSTYSLSSTLTLSKADYEKHKVYACEVTHQGLSSPVTKSFNRGEC

SEQ ID NO: 45 - protein, 5 aa, Artificial Sequence
  Synthetic: VHCDR1 Ab3
QYSMH

SEQ ID NO: 46 - protein, 17 aa, Artificial Sequence
  Synthetic: VHCDR2 Ab3
LISFDGADKYYADSVKG

SEQ ID NO: 47 - protein, 15 aa, Artificial Sequence
  Synthetic: VHCDR3 Ab3
GAGRGYTYGPDGFDI

SEQ ID NO: 48 - protein, 11 aa, Artificial Sequence
  Synthetic: VLCDR1 Ab3
RTSQTISRYLN

SEQ ID NO: 49 - protein, 7 aa, Artificial Sequence
  Synthetic: VLCDR2 Ab3
TATSLQS

SEQ ID NO: 50 - protein, 9 aa, Artificial Sequence
  Synthetic: VLCDR3 Ab3
QQTYSAPLT

SEQ ID NO: 51 - protein, 124 aa, Artificial Sequence
  Synthetic: VH Ab3
EVQLVESGGGVVQPGRSLRLSCAASGFTFSQYSMHWVRQSPGKGLEWVTLISFDGADKYYADSVKGRFTISRDNSNDTLFLHMNGLRVEDTAIYYCVRGAGRGYTYGPDGFDIWGQGTMVTVSS

SEQ ID NO: 52 - protein, 107 aa, Artificial Sequence
  Synthetic: VL Ab3
DIQLTQSPSSLSASVGDRVTITCRTSQTISRYLNWYQQQPGKAPKLLIYTATSLQSGVPSRFSGSGSGTDFTLTIGGLQPEDFAIYFCQQTYSAPLTFGGGTKVEIK

SEQ ID NO: 53 - protein, 267 aa, Artificial Sequence
  Synthetic: VHVL Ab3 (scFv)
EVQLVESGGGVVQPGRSLRLSCAASGFTFSQYSMHWVRQSPGKGLEWVTLISFDGADKYYADSVKGRFTISRDNSNDTLFLHMNGLRVEDTAIYYCVRGAGRGYTYGPDGFDIWGQGTMVTVSSASTGGGGSGGGGSGGGGSGGGGSDIQLTQSPSSLSASVGDRVTITCRTSQTISRYLNWYQQQPGKAPKLLIYTATSLQSGVPSRFSGSGSGTDFTLTIGGLQPEDFAIYFCQQTYSAPLTFGGGTKVEIKRTVAAPSHHHHHH

SEQ ID NO: 54 - protein, 446 aa, Artificial Sequence
  Synthetic: HC Ab3
EVQLVESGGGVVQPGRSLRLSCAASGFTFSQYSMHWVRQSPGKGLEWVTLISFDGADKYYADSVKGRFTISRDNSNDTLFLHMNGLRVEDTAIYYCVRGAGRGYTYGPDGFDIWGQGTMVTVSSKGPSVFPLAPSSRSTSESTAALGCLVKDYFPEPVTVSWNSGALTSGVHTFPAVLQSSGLYSLSSVVTVPSSNFGTQTYTCNVDHKPSNTKVDKTVERKCCVECPPCPAPPVAGPSVFLFPPKPKDTLMISRTPEVTCVVVDVSHEDPEVQFNWYVDGVEVHNAKTKPREEQFNSTFRVVSVLTVVHQDWLNGKEYKCKVSNKGLPAPIEKTISKTKGQPREPQVYTLPPSREEMTKNQVSLTCLVKGFYPSDIAVEWESNGQPENNYKTTPPMLDSDGSFFLYSKLTVDKSRWQQGNVFSCSVMHEALHNHYTQKSLSLSPG

SEQ ID NO: 55 - protein, 214 aa, Artificial Sequence
  Synthetic: LC Ab3
DIQLTQSPSSLSASVGDRVTITCRTSQTISRYLNWYQQQPGKAPKLLIYTATSLQSGVPSRFSGSGSGTDFTLTIGGLQPEDFAIYFCQQTYSAPLTFGGGTKVEIKRTVAAPSVFIFPPSDEQLKSGTASVVCLLNNFYPREAKVQWKVDNALQSGNSQESVTEQDSKDSTYSLSSTLTLSKADYEKHKVYACEVTHQGLSSPVTKSFNRGEC

SEQ ID NO: 56 - protein, 5 aa, Artificial Sequence
  Synthetic: VHCDR1 Ab4
SYAMH

SEQ ID NO: 57 - protein, 17 aa, Artificial Sequence
  Synthetic: VHCDR2 Ab4
LISYDGSNKYYADSVKG

SEQ ID NO: 58 - protein, 15 aa, Artificial Sequence
  Synthetic: VHCDR3 Ab4
GAGRGYTYGPDGFDI

SEQ ID NO: 59 - protein, 16 aa, Artificial Sequence
  Synthetic: VLCDR1 Ab4
KSSQSLIFGDGKTYLY

SEQ ID NO: 60 - protein, 7 aa, Artificial Sequence
  Synthetic: VLCDR2 Ab4
QVSNRFS

SEQ ID NO: 61 - protein, 9 aa, Artificial Sequence
  Synthetic: VLCDR3 Ab4
MQAKQFPWT

SEQ ID NO: 62 - protein, 124 aa, Artificial Sequence; identical to SEQ ID NO: 40
  Synthetic: VH Ab4

SEQ ID NO: 63 - protein, 112 aa, Artificial Sequence
  Synthetic: VL Ab4
DIVMTQTPLSLSVTPGQPASIFCKSSQSLIFGDGKTYLYWYLQKPGQPPRLLIYQVSNRFSGVPDRFSGSGAGTDFTLKISRVEAEDVGVYYCMQAKQFPWTFGQGTKLEIK

SEQ ID NO: 64 - protein, 261 aa, Artificial Sequence
  Synthetic: VHVL Ab4 (scFv)
EVQLLESGGGVVQPGRSLRLSCAASGFTFSSYAMHWVRQAPGKGLEWVALISYDGSNKYYADSVKGRFTISRDNSKNTLYLQMNSLRAEDTAIYYCVRGAGRGYTYGPDGFDIWGQGTMVTVSSASTGGGSGGGGSDIVMTQTPLSLSVTPGQPASIFCKSSQSLIFGDGKTYLYWYLQKPGQPPRLLIYQVSNRFSGVPDRFSGSGAGTDFTLKISRVEAEDVGVYYCMQAKQFPWTFGQGTKLEIKRTVAAPSHHHHHH

SEQ ID NO: 65 - protein, 446 aa, Artificial Sequence; identical to SEQ ID NO: 43
  Synthetic: HC Ab4

SEQ ID NO: 66 - protein, 219 aa, Artificial Sequence
  Synthetic: LC Ab4
DIVMTQTPLSLSVTPGQPASIFCKSSQSLIFGDGKTYLYWYLQKPGQPPRLLIYQVSNRFSGVPDRFSGSGAGTDFTLKISRVEAEDVGVYYCMQAKQFPWTFGQGTKLEIKRTVAAPSVFIFPPSDEQLKSGTASVVCLLNNFYPREAKVQWKVDNALQSGNSQESVTEQDSKDSTYSLSSTLTLSKADYEKHKVYACEVTHQGLSSPVTKSFNRGEC

SEQ ID NO: 67 - protein, 5 aa, Artificial Sequence
  Synthetic: VHCDR1 Ab5
HYAMH

SEQ ID NO: 68 - protein, 17 aa, Artificial Sequence
  Synthetic: VHCDR2 Ab5
VISYDGSNKYYADSVKG

SEQ ID NO: 69 - protein, 15 aa, Artificial Sequence
  Synthetic: VHCDR3 Ab5
GAGRGYTYGPDGFDI

SEQ ID NO: 70 - protein, 16 aa, Artificial Sequence
  Synthetic: VLCDR1 Ab5
KSSQSLLYSDGKTYLS

SEQ ID NO: 71 - protein, 7 aa, Artificial Sequence
  Synthetic: VLCDR2 Ab5
EVSSRFS

SEQ ID NO: 72 - protein, 9 aa, Artificial Sequence
  Synthetic: VLCDR3 Ab5
MQATRFPWT

SEQ ID NO: 73 - protein, 124 aa, Artificial Sequence
  Synthetic: VH Ab5
QVQLVESGGDVVQPGRSLRLSCAASGFTFGHYAMHWVRQAPGQGLEWVTVISYDGSNKYYADSVKGRFTISRDNSKNTVDLQMNSLRVEDTAIYYCVRGAGRGYTYGPDGFDIWGQGTMVTVSS

SEQ ID NO: 74 - protein, 112 aa, Artificial Sequence
  Synthetic: VL Ab5
  misc_feature (86)..(86): Xaa can be any naturally occurring amino acid
EIVMTQTPLSLSVTPGQPASISCKSSQSLLYSDGKTYLSWYLQKPGQSPQLLIYEVSSRFSGVPDRFSGSGAGTDFTLKISRVEAXDVGVYYCMQATRFPWTFGQGTKVEIK

SEQ ID NO: 75 - protein, 272 aa, Artificial Sequence
  Synthetic: VHVL Ab5 (scFv)
  misc_feature (233)..(233): Xaa can be any naturally occurring amino acid
QVQLVESGGDVVQPGRSLRLSCAASGFTFGHYAMHWVRQAPGQGLEWVTVISYDGSNKYYADSVKGRFTISRDNSKNTVDLQMNSLRVEDTAIYYCVRGAGRGYTYGPDGFDIWGQGTMVTVSSASTGGGGSGGGGSGGGGSGGGGSEIVMTQTPLSLSVTPGQPASISCKSSQSLLYSDGKTYLSWYLQKPGQSPQLLIYEVSSRFSGVPDRFSGSGAGTDFTLKISRVEAXDVGVYYCMQATRFPWTFGQGTKVEIKRTVAAPSHHHHHH

SEQ ID NO: 76 - protein, 446 aa, Artificial Sequence
  Synthetic: HC Ab5
QVQLVESGGDVVQPGRSLRLSCAASGFTFGHYAMHWVRQAPGQGLEWVTVISYDGSNKYYADSVKGRFTISRDNSKNTVDLQMNSLRVEDTAIYYCVRGAGRGYTYGPDGFDIWGQGTMVTVSSKGPSVFPLAPSSRSTSESTAALGCLVKDYFPEPVTVSWNSGALTSGVHTFPAVLQSSGLYSLSSVVTVPSSNFGTQTYTCNVDHKPSNTKVDKTVERKCCVECPPCPAPPVAGPSVFLFPPKPKDTLMISRTPEVTCVVVDVSHEDPEVQFNWYVDGVEVHNAKTKPREEQFNSTFRVVSVLTVVHQDWLNGKEYKCKVSNKGLPAPIEKTISKTKGQPREPQVYTLPPSREEMTKNQVSLTCLVKGFYPSDIAVEWESNGQPENNYKTTPPMLDSDGSFFLYSKLTVDKSRWQQGNVFSCSVMHEALHNHYTQKSLSLSPG

SEQ ID NO: 77 - protein, 219 aa, Artificial Sequence
  Synthetic: LC Ab5
  misc_feature (86)..(86): Xaa can be any naturally occurring amino acid
EIVMTQTPLSLSVTPGQPASISCKSSQSLLYSDGKTYLSWYLQKPGQSPQLLIYEVSSRFSGVPDRFSGSGAGTDFTLKISRVEAXDVGVYYCMQATRFPWTFGQGTKVEIKRTVAAPSVFIFPPSDEQLKSGTASVVCLLNNFYPREAKVQWKVDNALQSGNSQESVTEQDSKDSTYSLSSTLTLSKADYEKHKVYACEVTHQGLSSPVTKSFNRGEC

SEQ ID NO: 78 - protein, 5 aa, Artificial Sequence
  Synthetic: VHCDR1 Ab6
SYAMH

SEQ ID NO: 79 - protein, 17 aa, Artificial Sequence
  Synthetic: VHCDR2 Ab6
VISYDGSNKYYADSVKG

SEQ ID NO: 80 - protein, 15 aa, Artificial Sequence
  Synthetic: VHCDR3 Ab6
GAGRGYTYGPDGFDI

SEQ ID NO: 81 - protein, 16 aa, Artificial Sequence
  Synthetic: VLCDR1 Ab6
RSSQSLVYTDGITYLS

SEQ ID NO: 82 - protein, 7 aa, Artificial Sequence
  Synthetic: VLCDR2 Ab6
EISNRFS

SEQ ID NO: 83 - protein, 9 aa, Artificial Sequence
  Synthetic: VLCDR3 Ab6
MQATQFPWT

SEQ ID NO: 84 - protein, 124 aa, Artificial Sequence
  Synthetic: VH Ab6
EVQLQESGGGLVQPGGSMKLSCVASGFTFSSYAMHWVRQAPGKGLEWVAVISYDGSNKYYADSVKGRFTISRDNAKNTLYLQMNSLRAEDTATYYCVRGAGRGYTYGPDGFDIWGQGTMVTVSS

SEQ ID NO: 85 - protein, 112 aa, Artificial Sequence; identical to SEQ ID NO: 30
  Synthetic: VL Ab6

SEQ ID NO: 86 - protein, 263 aa, Artificial Sequence
  Synthetic: VHVL Ab6 (scFv)
EVQLQESGGGLVQPGGSMKLSCVASGFTFSSYAMHWVRQAPGKGLEWVAVISYDGSNKYYADSVKGRFTISRDNAKNTLYLQMNSLRAEDTATYYCVRGAGRGYTYGPDGFDIWGQGTMVTVSSASTGGGGSGGGGGSDIVMTQSPRSLPVTLGQPASISCRSSQSLVYTDGITYLSWLQQRPGQPPRLLIYEISNRFSGVPDRFSGSGAGTDFTLKISRVEAEDVGVYYCMQATQFPWTFGQGTKVDIKRTVAAPSHHHHHH

SEQ ID NO: 87 - protein, 446 aa, Artificial Sequence
  Synthetic: HC Ab6
EVQLQESGGGLVQPGGSMKLSCVASGFTFSSYAMHWVRQAPGKGLEWVAVISYDGSNKYYADSVKGRFTISRDNAKNTLYLQMNSLRAEDTATYYCVRGAGRGYTYGPDGFDIWGQGTMVTVSSKGPSVFPLAPSSRSTSESTAALGCLVKDYFPEPVTVSWNSGALTSGVHTFPAVLQSSGLYSLSSVVTVPSSNFGTQTYTCNVDHKPSNTKVDKTVERKCCVECPPCPAPPVAGPSVFLFPPKPKDTLMISRTPEVTCVVVDVSHEDPEVQFNWYVDGVEVHNAKTKPREEQFNSTFRVVSVLTVVHQDWLNGKEYKCKVSNKGLPAPIEKTISKTKGQPREPQVYTLPPSREEMTKNQVSLTCLVKGFYPSDIAVEWESNGQPENNYKTTPPMLDSDGSFFLYSKLTVDKSRWQQGNVFSCSVMHEALHNHYTQKSLSLSPG

SEQ ID NO: 88 - protein, 219 aa, Artificial Sequence; identical to SEQ ID NO: 33
  Synthetic: LC Ab6

SEQ ID NO: 89 - protein, 5 aa, Artificial Sequence
  Synthetic: VHCDR1 Ab7
GYAIH

SEQ ID NO: 90 - protein, 17 aa, Artificial Sequence
  Synthetic: VHCDR2 Ab7
LISYDGSNKYYADSAKG

SEQ ID NO: 91 - protein, 15 aa, Artificial Sequence
  Synthetic: VHCDR3 Ab7
GAGRGYTYGPDGFDI

SEQ ID NO: 92 - protein, 16 aa, Artificial Sequence
  Synthetic: VLCDR1 Ab7
RSSESLVYRDGNTYLS

SEQ ID NO: 93 - protein, 7 aa, Artificial Sequence
  Synthetic: VLCDR2 Ab7
KVSNRFS

SEQ ID NO: 94 - protein, 9 aa, Artificial Sequence
  Synthetic: VLCDR3 Ab7
MQATQFPWT

SEQ ID NO: 95 - protein, 124 aa, Artificial Sequence
  Synthetic: VH Ab7
QVQLVESGGGVVQPGRSLRLSCAASGFTFSGYAIHWVRQAPGKGLEWVALISYDGSNKYYADSAKGRFTISRDNSKNTLSLQMNSLRVEDTAIYYCVRGAGRGYTYGPDGFDIWGQGTMVTVSS

SEQ ID NO: 96 - protein, 112 aa, Artificial Sequence
  Synthetic: VL Ab7
DIVMTQTPLSSPVTLGQPASISCRSSESLVYRDGNTYLSWLHQRPGQSPRLLIYKVSNRFSGVPDRFSGSGAGTDFTLKISRVEAEDVGVYFCMQATQFPWTFGQGTKVEIK

SEQ ID NO: 97 - protein, 272 aa, Artificial Sequence
  Synthetic: VHVL Ab7 (scFv)
QVQLVESGGGVVQPGRSLRLSCAASGFTFSGYAIHWVRQAPGKGLEWVALISYDGSNKYYADSAKGRFTISRDNSKNTLSLQMNSLRVEDTAIYYCVRGAGRGYTYGPDGFDIWGQGTMVTVSSASTGGGGSGGGGSGGGGSGGGGSDIVMTQTPLSSPVTLGQPASISCRSSESLVYRDGNTYLSWLHQRPGQSPRLLIYKVSNRFSGVPDRFSGSGAGTDFTLKISRVEAEDVGVYFCMQATQFPWTFGQGTKVEIKRTVAAPSHHHHHH

SEQ ID NO: 98 - protein, 446 aa, Artificial Sequence
  Synthetic: HC Ab7
QVQLVESGGGVVQPGRSLRLSCAASGFTFSGYAIHWVRQAPGKGLEWVALISYDGSNKYYADSAKGRFTISRDNSKNTLSLQMNSLRVEDTAIYYCVRGAGRGYTYGPDGFDIWGQGTMVTVSSKGPSVFPLAPSSRSTSESTAALGCLVKDYFPEPVTVSWNSGALTSGVHTFPAVLQSSGLYSLSSVVTVPSSNFGTQTYTCNVDHKPSNTKVDKTVERKCCVECPPCPAPPVAGPSVFLFPPKPKDTLMISRTPEVTCVVVDVSHEDPEVQFNWYVDGVEVHNAKTKPREEQFNSTFRVVSVLTVVHQDWLNGKEYKCKVSNKGLPAPIEKTISKTKGQPREPQVYTLPPSREEMTKNQVSLTCLVKGFYPSDIAVEWESNGQPENNYKTTPPMLDSDGSFFLYSKLTVDKSRWQQGNVFSCSVMHEALHNHYTQKSLSLSPG

SEQ ID NO: 99 - protein, 219 aa, Artificial Sequence
  Synthetic: LC Ab7
DIVMTQTPLSSPVTLGQPASISCRSSESLVYRDGNTYLSWLHQRPGQSPRLLIYKVSNRFSGVPDRFSGSGAGTDFTLKISRVEAEDVGVYFCMQATQFPWTFGQGTKVEIKRTVAAPSVFIFPPSDEQLKSGTASVVCLLNNFYPREAKVQWKVDNALQSGNSQESVTEQDSKDSTYSLSSTLTLSKADYEKHKVYACEVTHQGLSSPVTKSFNRGEC

SEQ ID NO: 100 - protein, 5 aa, Artificial Sequence
  Synthetic: VHCDR1 Ab8
SYAMH

SEQ ID NO: 101 - protein, 17 aa, Artificial Sequence
  Synthetic: VHCDR2 Ab8
VISYDGSNKYYADSVKG

SEQ ID NO: 102 - protein, 15 aa, Artificial Sequence
  Synthetic: VHCDR3 Ab8
GAGRGYTYGPDGFDI

SEQ ID NO: 103 - protein, 16 aa, Artificial Sequence
  Synthetic: VLCDR1 Ab8
RSSQSLVYSDGNTYLN

SEQ ID NO: 104 - protein, 7 aa, Artificial Sequence
  Synthetic: VLCDR2 Ab8
KVSNRFS

SEQ ID NO: 105 - protein, 9 aa, Artificial Sequence
  Synthetic: VLCDR3 Ab8
MQATRFPWT

SEQ ID NO: 106 - protein, 124 aa, Artificial Sequence
  Synthetic: VH Ab8
EVQLVESGGGVVQPGRSLRLSCAASGFTFSSYAMHWVRQAPGKGLEWVAVISYDGSNKYYADSVKGRFTISRDNSKNTLSLQMNSLRVEDTAIYYCVRGAGRGYTYGPDGFDIWGQGTMVTVSS

SEQ ID NO: 107 - protein, 112 aa, Artificial Sequence
  Synthetic: VL Ab8
EIVMTQTPLSSPVTLGQPASISCRSSQSLVYSDGNTYLNWLQQRPGQPPRLLIYKVSNRFSGVPDRFSGSGAGTDFTLKISRVEAEDVGVYYCMQATRFPWTFGQGTKVEIK

SEQ ID NO: 108 - protein, 272 aa, Artificial Sequence
  Synthetic: VHVL Ab8 (scFv)
EVQLVESGGGVVQPGRSLRLSCAASGFTFSSYAMHWVRQAPGKGLEWVAVISYDGSNKYYADSVKGRFTISRDNSKNTLSLQMNSLRVEDTAIYYCVRGAGRGYTYGPDGFDIWGQGTMVTVSSASTGGGGSGGGGSGGGGSGGGGSEIVMTQTPLSSPVTLGQPASISCRSSQSLVYSDGNTYLNWLQQRPGQPPRLLIYKVSNRFSGVPDRFSGSGAGTDFTLKISRVEAEDVGVYYCMQATRFPWTFGQGTKVEIKRTVAAPSHHHHHH

SEQ ID NO: 109 - protein, 446 aa, Artificial Sequence
  Synthetic: HC Ab8
EVQLVESGGGVVQPGRSLRLSCAASGFTFSSYAMHWVRQAPGKGLEWVAVISYDGSNKYYADSVKGRFTISRDNSKNTLSLQMNSLRVEDTAIYYCVRGAGRGYTYGPDGFDIWGQGTMVTVSSKGPSVFPLAPSSRSTSESTAALGCLVKDYFPEPVTVSWNSGALTSGVHTFPAVLQSSGLYSLSSVVTVPSSNFGTQTYTCNVDHKPSNTKVDKTVERKCCVECPPCPAPPVAGPSVFLFPPKPKDTLMISRTPEVTCVVVDVSHEDPEVQFNWYVDGVEVHNAKTKPREEQFNSTFRVVSVLTVVHQDWLNGKEYKCKVSNKGLPAPIEKTISKTKGQPREPQVYTLPPSREEMTKNQVSLTCLVKGFYPSDIAVEWESNGQPENNYKTTPPMLDSDGSFFLYSKLTVDKSRWQQGNVFSCSVMHEALHNHYTQKSLSLSPG

SEQ ID NO: 110 - protein, 219 aa, Artificial Sequence
  Synthetic: LC Ab8
EIVMTQTPLSSPVTLGQPASISCRSSQSLVYSDGNTYLNWLQQRPGQPPRLLIYKVSNRFSGVPDRFSGSGAGTDFTLKISRVEAEDVGVYYCMQATRFPWTFGQGTKVEIKRTVAAPSVFIFPPSDEQLKSGTASVVCLLNNFYPREAKVQWKVDNALQSGNSQESVTEQDSKDSTYSLSSTLTLSKADYEKHKVYACEVTHQGLSSPVTKSFNRGEC

SEQ ID NO: 111 - protein, 5 aa, Artificial Sequence
  Synthetic: VHCDR1 Ab9
THAMH

SEQ ID NO: 112 - protein, 17 aa, Artificial Sequence
  Synthetic: VHCDR2 Ab9
LISYDGSEKYYADSVKG

SEQ ID NO: 113 - protein, 15 aa, Artificial Sequence
  Synthetic: VHCDR3 Ab9
GAGRGYTYGPDGFDI

SEQ ID NO: 114 - protein, 16 aa, Artificial Sequence
  Synthetic: VLCDR1 Ab9
KSSQSLLHSDGKTYLY

SEQ ID NO: 115 - protein, 7 aa, Artificial Sequence
  Synthetic: VLCDR2 Ab9
EVSSRFS

SEQ ID NO: 116 - protein, 9 aa, Artificial Sequence
  Synthetic: VLCDR3 Ab9
MQYINLPLT

SEQ ID NO: 117 - protein, 124 aa, Artificial Sequence
  Synthetic: VH Ab9
  misc_feature (10)..(10): Xaa can be any naturally occurring amino acid
  misc_feature (12)..(12): Xaa can be any naturally occurring amino acid
  misc_feature (16)..(16): Xaa can be any naturally occurring amino acid
QVQLLESGGXVXHPGXSLRLSCATSGFSFTTHAMHWVRQAPGKGLEWVALISYDGSEKYYADSVKGRFTISRDNSKNTLSLQMNSLRVEDTAIYYCVRGAGRGYTYGPDGFDIWGQGTMVTVSS

SEQ ID NO: 118 - protein, 112 aa, Artificial Sequence
  Synthetic: VL Ab9
DIVMTQTPLSLSVTPGQPASISCKSSQSLLHSDGKTYLYWYLQKPGQSPQLLMYEVSSRFSGVPDRFSGSGSGTDFTLKISRVEAEDVGVYYCMQYINLPLTFGGGTKLEIK

SEQ ID NO: 119 - protein, 272 aa, Artificial Sequence
  Synthetic: VHVL Ab9 (scFv)
  misc_feature (10)..(10): Xaa can be any naturally occurring amino acid
  misc_feature (12)..(12): Xaa can be any naturally occurring amino acid
  misc_feature (16)..(16): Xaa can be any naturally occurring amino acid
QVQLLESGGXVXHPGXSLRLSCATSGFSFTTHAMHWVRQAPGKGLEWVALISYDGSEKYYADSVKGRFTISRDNSKNTLSLQMNSLRVEDTAIYYCVRGAGRGYTYGPDGFDIWGQGTMVTVSSASTGGGGSGGGGSGGGGSGGGGSDIVMTQTPLSLSVTPGQPASISCKSSQSLLHSDGKTYLYWYLQKPGQSPQLLMYEVSSRFSGVPDRFSGSGSGTDFTLKISRVEAEDVGVYYCMQYINLPLTFGGGTKLEIKRTVAAPSHHHHHH

SEQ ID NO: 120 - protein, 446 aa, Artificial Sequence
  Synthetic: HC Ab9
  misc_feature (10)..(10): Xaa can be any naturally occurring amino acid
  misc_feature (12)..(12): Xaa can be any naturally occurring amino acid
  misc_feature (16)..(16): Xaa can be any naturally occurring amino acid
QVQLLESGGXVXHPGXSLRLSCATSGFSFTTHAMHWVRQAPGKGLEWVALISYDGSEKYYADSVKGRFTISRDNSKNTLSLQMNSLRVEDTAIYYCVRGAGRGYTYGPDGFDIWGQGTMVTVSSKGPSVFPLAPSSRSTSESTAALGCLVKDYFPEPVTVSWNSGALTSGVHTFPAVLQSSGLYSLSSVVTVPSSNFGTQTYTCNVDHKPSNTKVDKTVERKCCVECPPCPAPPVAGPSVFLFPPKPKDTLMISRTPEVTCVVVDVSHEDPEVQFNWYVDGVEVHNAKTKPREEQFNSTFRVVSVLTVVHQDWLNGKEYKCKVSNKGLPAPIEKTISKTKGQPREPQVYTLPPSREEMTKNQVSLTCLVKGFYPSDIAVEWESNGQPENNYKTTPPMLDSDGSFFLYSKLTVDKSRWQQGNVFSCSVMHEALHNHYTQKSLSLSPG

SEQ ID NO: 121 - protein, 219 aa, Artificial Sequence
  Synthetic: LC Ab9
DIVMTQTPLSLSVTPGQPASISCKSSQSLLHSDGKTYLYWYLQKPGQSPQLLMYEVSSRFSGVPDRFSGSGSGTDFTLKISRVEAEDVGVYYCMQYINLPLTFGGGTKLEIKRTVAAPSVFIFPPSDEQLKSGTASVVCLLNNFYPREAKVQWKVDNALQSGNSQESVTEQDSKDSTYSLSSTLTLSKADYEKHKVYACEVTHQGLSSPVTKSFNRGEC

SEQ ID NO: 122 - protein, 5 aa, Artificial Sequence
  Synthetic: VHCDR1 Ab10
HYAMH

SEQ ID NO: 123 - protein, 17 aa, Artificial Sequence
  Synthetic: VHCDR2 Ab10
VISYDGSNKYYADSVKG

SEQ ID NO: 124 - protein, 15 aa, Artificial Sequence
  Synthetic: VHCDR3 Ab10
GAGRGYTYGPDGFDI

SEQ ID NO: 125 - protein, 16 aa, Artificial Sequence
  Synthetic: VLCDR1 Ab10
RSSQSLVYSDGNTYLN

SEQ ID NO: 126 - protein, 7 aa, Artificial Sequence
  Synthetic: VLCDR2 Ab10
KVSNRFS

SEQ ID NO: 127 - skipped

SEQ ID NO: 128 - protein, 124 aa, Artificial Sequence; identical to SEQ ID NO: 73
  Synthetic: VH Ab10

SEQ ID NO: 129 - protein, 87 aa, Artificial Sequence
  Synthetic: VL Ab10
EIVLTQTPLSSPVTLGQPASISCRSSQSLVYSDGNTYLNWLQQRPGQPPRLLIYKVSNRFSGVPDRFSGSGAGTDFTLKISRVEAED

SEQ ID NO: 130 - protein, 234 aa, Artificial Sequence
  Synthetic: VHVL Ab10 (scFv)
QVQLVESGGDVVQPGRSLRLSCAASGFTFGHYAMHWVRQAPGQGLEWVTVISYDGSNKYYADSVKGRFTISRDNSKNTVDLQMNSLRVEDTAIYYCVRGAGRGYTYGPDGFDIWGQGTMVTVSSASTGGGGSGGGGSGGGGSGGGGSEIVLTQTPLSSPVTLGQPASISCRSSQSLVYSDGNTYLNWLQQRPGQPPRLLIYKVSNRFSGVPDRFSGSGAGTDFTLKISRVEAED

SEQ ID NO: 131 - protein, 446 aa, Artificial Sequence; identical to SEQ ID NO: 76
  Synthetic: HC Ab10

SEQ ID NO: 132 - protein, 87 aa, Artificial Sequence; identical to SEQ ID NO: 129
  Synthetic: LC Ab10

SEQ ID NO: 133 - protein, 5 aa, Artificial Sequence
  Synthetic: VHCDR1 Ab11
SYAMH

SEQ ID NO: 134 - protein, 17 aa, Artificial Sequence
  Synthetic: VHCDR2 Ab11
VISYDGSNKYYADSVKG

SEQ ID NO: 135 - protein, 15 aa, Artificial Sequence
  Synthetic: VHCDR3 Ab11
GAGRGYTYGPDGFDI

SEQ ID NO: 136 - protein, 16 aa, Artificial Sequence
  Synthetic: VLCDR1 Ab11
RSSQSLVYTDGITYLS

SEQ ID NO: 137 - protein, 7 aa, Artificial Sequence
  Synthetic: VLCDR2 Ab11
EISNRFS

SEQ ID NO: 138 - protein, 9 aa, Artificial Sequence
  Synthetic: VLCDR3 Ab11
MQATQFPWT

SEQ ID NO: 139 - protein, 124 aa, Artificial Sequence; identical to SEQ ID NO: 84
  Synthetic: VH Ab11

SEQ ID NO: 140 - protein, 112 aa, Artificial Sequence
  Synthetic: VL Ab11
  misc_feature (86)..(86): Xaa can be any naturally occurring amino acid
DIVMTQSPRSLPVTLGQPASISCRSSQSLVYTDGITYLSWLQQRPGQPPRLLIYEISNRFSGVPDRFSGSGAGTDFTLKISRVEAXDVGVYYCMQATQFPWTFGQGTKVDIK

SEQ ID NO: 141 - protein, 263 aa, Artificial Sequence
  Synthetic: VHVL Ab11 (scFv)
  misc_feature (224)..(224): Xaa can be any naturally occurring amino acid
EVQLQESGGGLVQPGGSMKLSCVASGFTFSSYAMHWVRQAPGKGLEWVAVISYDGSNKYYADSVKGRFTISRDNAKNTLYLQMNSLRAEDTATYYCVRGAGRGYTYGPDGFDIWGQGTMVTVSSASTGGGGSGGGGGSDIVMTQSPRSLPVTLGQPASISCRSSQSLVYTDGITYLSWLQQRPGQPPRLLIYEISNRFSGVPDRFSGSGAGTDFTLKISRVEAXDVGVYYCMQATQFPWTFGQGTKVDIKRTVAAPSHHHHHH

SEQ ID NO: 142 - protein, 446 aa, Artificial Sequence; identical to SEQ ID NO: 87
  Synthetic: HC Ab11

SEQ ID NO: 143 - protein, 219 aa, Artificial Sequence
  Synthetic: LC Ab11
  misc_feature (86)..(86): Xaa can be any naturally occurring amino acid
DIVMTQSPRSLPVTLGQPASISCRSSQSLVYTDGITYLSWLQQRPGQPPRLLIYEISNRFSGVPDRFSGSGAGTDFTLKISRVEAXDVGVYYCMQATQFPWTFGQGTKVDIKRTVAAPSVFIFPPSDEQLKSGTASVVCLLNNFYPREAKVQWKVDNALQSGNSQESVTEQDSKDSTYSLSSTLTLSKADYEKHKVYACEVTHQGLSSPVTKSFNRGEC

SEQ ID NO: 144 - protein, 5 aa, Artificial Sequence
  Synthetic: VHCDR1 Ab12
SHDIN

SEQ ID NO: 145 - protein, 17 aa, Artificial Sequence
  Synthetic: VHCDR2 Ab12
WINPNNDITDYAQEFQG

SEQ ID NO: 146 - protein, 14 aa, Artificial Sequence
  Synthetic: VHCDR3 Ab12
GAGMLFHAVGQFDS

SEQ ID NO: 147 - protein, 11 aa, Artificial Sequence
  Synthetic: VLCDR1 Ab12
QASQDIRKNLN

SEQ ID NO: 148 - protein, 7 aa, Artificial Sequence
  Synthetic: VLCDR2 Ab12
DASNLDT

SEQ ID NO: 149 - protein, 9 aa, Artificial Sequence
  Synthetic: VLCDR3 Ab12
LQYGDLPLT

SEQ ID NO: 150 - protein, 123 aa, Artificial Sequence
  Synthetic: VH Ab12
QVQLVQSGAEVKKPGASVKVSCQASGYRFTSHDINWVRQVPGHGLEWMGWINPNNDITDYAQEFQGRLTMTSDTSTRTAYMELSSLTAEDTAVYYCARGAGMLFHAVGQFDSWGQGTLVTVSS

SEQ ID NO: 151 - protein, 107 aa, Artificial Sequence
  Synthetic: VL Ab12
  misc_feature (99)..(99): Xaa can be any naturally occurring amino acid
AIRMTQSPSSLSASVGDRVTITCQASQDIRKNLNWYQQKPGKAPELLINDASNLDTGVPSRFSGGGSGTDFTFTISSLQPEDIATYFCLQYGDLPLTFXGGTKVDIK

SEQ ID NO: 152 - protein, 266 aa, Artificial Sequence
  Synthetic: VHVL Ab12 (scFv)
  misc_feature (245)..(245): Xaa can be any naturally occurring amino acid
QVQLVQSGAEVKKPGASVKVSCQASGYRFTSHDINWVRQVPGHGLEWMGWINPNNDITDYAQEFQGRLTMTSDTSTRTAYMELSSLTAEDTAVYYCARGAGMLFHAVGQFDSWGQGTLVTVSSASTGGGGSGGGGSGGGGSGGGGSAIRMTQSPSSLSASVGDRVTITCQASQDIRKNLNWYQQKPGKAPELLINDASNLDTGVPSRFSGGGSGTDFTFTISSLQPEDIATYFCLQYGDLPLTFXGGTKVDIKRTVAAPSHHHHHH

SEQ ID NO: 153 - protein, 445 aa, Artificial Sequence
  Synthetic: HC Ab12
QVQLVQSGAEVKKPGASVKVSCQASGYRFTSHDINWVRQVPGHGLEWMGWINPNNDITDYAQEFQGRLTMTSDTSTRTAYMELSSLTAEDTAVYYCARGAGMLFHAVGQFDSWGQGTLVTVSSKGPSVFPLAPSSRSTSESTAALGCLVKDYFPEPVTVSWNSGALTSGVHTFPAVLQSSGLYSLSSVVTVPSSNFGTQTYTCNVDHKPSNTKVDKTVERKCCVECPPCPAPPVAGPSVFLFPPKPKDTLMISRTPEVTCVVVDVSHEDPEVQFNWYVDGVEVHNAKTKPREEQFNSTFRVVSVLTVVHQDWLNGKEYKCKVSNKGLPAPIEKTISKTKGQPREPQVYTLPPSREEMTKNQVSLTCLVKGFYPSDIAVEWESNGQPENNYKTTPPMLDSDGSFFLYSKLTVDKSRWQQGNVFSCSVMHEALHNHYTQKSLSLSPG

SEQ ID NO: 154 - protein, 214 aa, Artificial Sequence
  Synthetic: LC Ab12
  misc_feature (99)..(99): Xaa can be any naturally occurring amino acid
AIRMTQSPSSLSASVGDRVTITCQASQDIRKNLNWYQQKPGKAPELLINDASNLDTGVPSRFSGGGSGTDFTFTISSLQPEDIATYFCLQYGDLPLTFXGGTKVDIKRTVAAPSVFIFPPSDEQLKSGTASVVCLLNNFYPREAKVQWKVDNALQSGNSQESVTEQDSKDSTYSLSSTLTLSKADYEKHKVYACEVTHQGLSSPVTKSFNRGEC

SEQ ID NO: 155 - protein, 5 aa, Artificial Sequence
  Synthetic: VHCDR1 Ab13
SHDIN

SEQ ID NO: 156 - protein, 17 aa, Artificial Sequence
  Synthetic: VHCDR2 Ab13
WINPNNDITDYAQEFQG

SEQ ID NO: 157 - protein, 14 aa, Artificial Sequence
  Synthetic: VHCDR3 Ab13
GAGMLFHAVGQFDS

SEQ ID NO: 158 - protein, 11 aa, Artificial Sequence
  Synthetic: VLCDR1 Ab13
RASQSIGRFLN

SEQ ID NO: 159 - protein, 7 aa, Artificial Sequence
  Synthetic: VLCDR2 Ab13
TASTLQS

SEQ ID NO: 160 - protein, 8 aa, Artificial Sequence
  Synthetic: VLCDR3 Ab13
QQFKNYPT

SEQ ID NO: 161 - protein, 123 aa, Artificial Sequence
  Synthetic: VH Ab13
QMQLVQSGAEVKKPGASVKVSCQASGYRFTSHDINWVRQVPGHGLEWMGWINPNNDITDYAQEFQGRLTMTSDTSTRTAYMELSSLTAEDTAVYYCARGAGMLFHAVGQFDSWGQGTLVTVSS

SEQ ID NO: 162 - protein, 106 aa, Artificial Sequence
  Synthetic: VL Ab13
  misc_feature (82)..(82): Xaa can be any naturally occurring amino acid
  misc_feature (102)..(102): Xaa can be any naturally occurring amino acid
VIWMTQSPSSLSASVGDRVIITCRASQSIGRFLNWYQQTPGKPPKVLIHTASTLQSGVPSRFSGSGSGTHFTLTITGLQPEXFATYYCQQFKNYPTFGGGTXVEIK

SEQ ID NO: 163 - protein, 265 aa, Artificial Sequence
  Synthetic: VHVK Ab13 (scFv)
  misc_feature (228)..(228): Xaa can be any naturally occurring amino acid
  misc_feature (248)..(248): Xaa can be any naturally occurring amino acid
QMQLVQSGAEVKKPGASVKVSCQASGYRFTSHDINWVRQVPGHGLEWMGWINPNNDITDYAQEFQGRLTMTSDTSTRTAYMELSSLTAEDTAVYYCARGAGMLFHAVGQFDSWGQGTLVTVSSASTGGGGSGGGGSGGGGSGGGGSVIWMTQSPSSLSASVGDRVIITCRASQSIGRFLNWYQQTPGKPPKVLIHTASTLQSGVPSRFSGSGSGTHFTLTITGLQPEXFATYYCQQFKNYPTFGGGTXVEIKRTVAAPSHHHHHH

SEQ ID NO: 164 - protein, 445 aa, Artificial Sequence
  Synthetic: HC Ab13
QMQLVQSGAEVKKPGASVKVSCQASGYRFTSHDINWVRQVPGHGLEWMGWINPNNDITDYAQEFQGRLTMTSDTSTRTAYMELSSLTAEDTAVYYCARGAGMLFHAVGQFDSWGQGTLVTVSSKGPSVFPLAPSSRSTSESTAALGCLVKDYFPEPVTVSWNSGALTSGVHTFPAVLQSSGLYSLSSVVTVPSSNFGTQTYTCNVDHKPSNTKVDKTVERKCCVECPPCPAPPVAGPSVFLFPPKPKDTLMISRTPEVTCVVVDVSHEDPEVQFNWYVDGVEVHNAKTKPREEQFNSTFRVVSVLTVVHQDWLNGKEYKCKVSNKGLPAPIEKTISKTKGQPREPQVYTLPPSREEMTKNQVSLTCLVKGFYPSDIAVEWESNGQPENNYKTTPPMLDSDGSFFLYSKLTVDKSRWQQGNVFSCSVMHEALHNHYTQKSLSLSPG

SEQ ID NO: 165 - protein, 213 aa, Artificial Sequence
  Synthetic: LC Ab13
  misc_feature (82)..(82): Xaa can be any naturally occurring amino acid
  misc_feature (102)..(102): Xaa can be any naturally occurring amino acid
VIWMTQSPSSLSASVGDRVIITCRASQSIGRFLNWYQQTPGKPPKVLIHTASTLQSGVPSRFSGSGSGTHFTLTITGLQPEXFATYYCQQFKNYPTFGGGTXVEIKRTVAAPSVFIFPPSDEQLKSGTASVVCLLNNFYPREAKVQWKVDNALQSGNSQESVTEQDSKDSTYSLSSTLTLSKADYEKHKVYACEVTHQGLSSPVTKSFNRGEC

SEQ ID NO: 166 - protein, 5 aa, Artificial Sequence
  Synthetic: VHCDR1 Ab14
SNYMS

SEQ ID NO: 167 - protein, 16 aa, Artificial Sequence
  Synthetic: VHCDR2 Ab14
VIFSDGTTYYADSVKG

SEQ ID NO: 168 - protein, 9 aa, Artificial Sequence
  Synthetic: VHCDR3 Ab14
GPANGAYDI

SEQ ID NO: 169 - protein, 11 aa, Artificial Sequence
  Synthetic: VLCDR1 Ab14
RASQSISNWLA

SEQ ID NO: 170 - protein, 7 aa, Artificial Sequence
  Synthetic: VLCDR2 Ab14
RASTLES

SEQ ID NO: 171 - protein, 9 aa, Artificial Sequence
  Synthetic: VLCDR3 Ab14
QQYNVYSGT

SEQ ID NO: 172 - protein, 117 aa, Artificial Sequence
  Synthetic: VH Ab14
EVQLVETGGGLIQPGGSLRLSCVASGFTVSSNYMSWVRQAPGKGLEWVSVIFSDGTTYYADSVKGRFTISRDNSKNTLYLQMNSLKTEDTAVYYCVAGPANGAYDIWGQGTMVTVSS

SEQ ID NO: 173 - protein, 107 aa, Artificial Sequence
  Synthetic: VL Ab14
NIQMTQSPSILSASVGDRVTITCRASQSISNWLAWYQQKPGKAPKLLIFRASTLESGVPSRFSGSGSGAEFNLTISSLQPDDFATYYCQQYNVYSGTFGQGTKVEIK

SEQ ID NO: 174 - protein, 249 aa, Artificial Sequence
  Synthetic: VHVL Ab14 (scFv)
EVQLVETGGGLIQPGGSLRLSCVASGFTVSSNYMSWVRQAPGKGLEWVSVIFSDGTTYYADSVKGRFTISRDNSKNTLYLQMNSLKTEDTAVYYCVAGPANGAYDIWGQGTMVTVSSASTGGGSGGGGSNIQMTQSPSILSASVGDRVTITCRASQSISNWLAWYQQKPGKAPKLLIFRASTLESGVPSRFSGSGSGAEFNLTISSLQPDDFATYYCQQYNVYSGTFGQGTKVEIKRTVAAPSHHHHHH

SEQ ID NO: 175 - protein, 439 aa, Artificial Sequence
  Synthetic: HC Ab14
EVQLVETGGGLIQPGGSLRLSCVASGFTVSSNYMSWVRQAPGKGLEWVSVIFSDGTTYYADSVKGRFTISRDNSKNTLYLQMNSLKTEDTAVYYCVAGPANGAYDIWGQGTMVTVSSKGPSVFPLAPSSRSTSESTAALGCLVKDYFPEPVTVSWNSGALTSGVHTFPAVLQSSGLYSLSSVVTVPSSNFGTQTYTCNVDHKPSNTKVDKTVERKCCVECPPCPAPPVAGPSVFLFPPKPKDTLMISRTPEVTCVVVDVSHEDPEVQFNWYVDGVEVHNAKTKPREEQFNSTFRVVSVLTVVHQDWLNGKEYKCKVSNKGLPAPIEKTISKTKGQPREPQVYTLPPSREEMTKNQVSLTCLVKGFYPSDIAVEWESNGQPENNYKTTPPMLDSDGSFFLYSKLTVDKSRWQQGNVFSCSVMHEALHNHYTQKSLSLSPG

SEQ ID NO: 176 - protein, 214 aa, Artificial Sequence
  Synthetic: LC Ab14
NIQMTQSPSILSASVGDRVTITCRASQSISNWLAWYQQKPGKAPKLLIFRASTLESGVPSRFSGSGSGAEFNLTISSLQPDDFATYYCQQYNVYSGTFGQGTKVEIKRTVAAPSVFIFPPSDEQLKSGTASVVCLLNNFYPREAKVQWKVDNALQSGNSQESVTEQDSKDSTYSLSSTLTLSKADYEKHKVYACEVTHQGLSSPVTKSFNRGEC

SEQ ID NO: 177 - protein, 5 aa, Artificial Sequence
  Synthetic: VHCDR1 Ab15
SYAMH

SEQ ID NO: 178 - protein, 17 aa, Artificial Sequence
  Synthetic: VHCDR2 Ab15
VISYDGSNKYYADSVKG

SEQ ID NO: 179 - protein, 15 aa, Artificial Sequence
  Synthetic: VHCDR3 Ab15
GAGRGYTYGPDGFDI

SEQ ID NO: 180 - protein, 16 aa, Artificial Sequence
  Synthetic: VLCDR1 Ab15
TSSRSLLHSDGKTYVY

SEQ ID NO: 181 - protein, 7 aa, Artificial Sequence
  Synthetic: VLCDR2 Ab15
ELSNRFS

SEQ ID NO: 182 - protein, 9 aa, Artificial Sequence
  Synthetic: VLCDR3 Ab15
MQYIEAPLT

SEQ ID NO: 183 - protein, 124 aa, Artificial Sequence
  Synthetic: VH Ab15
EVQLLESGGGVVQPGRSLRLSCAASGFTFSSYAMHWVRQAPGKGLEWVAVISYDGSNKYYADSVKGRFTISRDNSKNTLSLQMNSLRVEDTAIYYCVRGAGRGYTYGPDGFDIWGQGTMVTVSS

SEQ ID NO: 184 - protein, 112 aa, Artificial Sequence
  Synthetic: VL Ab15
DIVMTQTPLSLSVTPGQPASISCTSSRSLLHSDGKTYVYWYVQKSGQPPQLLIYELSNRFSGVPDRFSGSGSRTDFTLKISRVEAEDVGVYYCMQYIEAPLTFGGGTKVEIK

SEQ ID NO: 185 - protein, 272 aa, Artificial Sequence
  Synthetic: VHVK Ab15 (scFv)
EVQLLESGGGVVQPGRSLRLSCAASGFTFSSYAMHWVRQAPGKGLEWVAVISYDGSNKYYADSVKGRFTISRDNSKNTLSLQMNSLRVEDTAIYYCVRGAGRGYTYGPDGFDIWGQGTMVTVSSASTGGGGSGGGGSGGGGSGGGGSDIVMTQTPLSLSVTPGQPASISCTSSRSLLHSDGKTYVYWYVQKSGQPPQLLIYELSNRFSGVPDRFSGSGSRTDFTLKISRVEAEDVGVYYCMQYIEAPLTFGGGTKVEIKRTVAAPSHHHHHH

SEQ ID NO: 186 - protein, 446 aa, Artificial Sequence
  Synthetic: HC Ab15
EVQLLESGGGVVQPGRSLRLSCAASGFTFSSYAMHWVRQAPGKGLEWVAVISYDGSNKYYADSVKGRFTISRDNSKNTLSLQMNSLRVEDTAIYYCVRGAGRGYTYGPDGFDIWGQGTMVTVSSKGPSVFPLAPSSRSTSESTAALGCLVKDYFPEPVTVSWNSGALTSGVHTFPAVLQSSGLYSLSSVVTVPSSNFGTQTYTCNVDHKPSNTKVDKTVERKCCVECPPCPAPPVAGPSVFLFPPKPKDTLMISRTPEVTCVVVDVSHEDPEVQFNWYVDGVEVHNAKTKPREEQFNSTFRVVSVLTVVHQDWLNGKEYKCKVSNKGLPAPIEKTISKTKGQPREPQVYTLPPSREEMTKNQVSLTCLVKGFYPSDIAVEWESNGQPENNYKTTPPMLDSDGSFFLYSKLTVDKSRWQQGNVFSCSVMHEALHNHYTQKSLSLSPG

SEQ ID NO: 187 - protein, 219 aa, Artificial Sequence
  Synthetic: LC Ab15
DIVMTQTPLSLSVTPGQPASISCTSSRSLLHSDGKTYVYWYVQKSGQPPQLLIYELSNRFSGVPDRFSGSGSRTDFTLKISRVEAEDVGVYYCMQYIEAPLTFGGGTKVEIKRTVAAPSVFIFPPSDEQLKSGTASVVCLLNNFYPREAKVQWKVDNALQSGNSQESVTEQDSKDSTYSLSSTLTLSKADYEKHKVYACEVTHQGLSSPVTKSFNRGEC

SEQ ID NO: 188 - protein, 5 aa, Artificial Sequence
  Synthetic: VHCDR1 Ab16
SYAMH

SEQ ID NO: 189 - protein, 17 aa, Artificial Sequence
  Synthetic: VHCDR2 Ab16
VISYDGSNKYYADSVKG

SEQ ID NO: 190 - protein, 15 aa, Artificial Sequence
  Synthetic: VHCDR3 Ab16
GAGRGYTRGPDGFDI

SEQ ID NO: 191 - protein, 16 aa, Artificial Sequence
  Synthetic: VLCDR1 Ab16
KSSRSLLHSDGKTYVY

SEQ ID NO: 192 - protein, 7 aa, Artificial Sequence
  Synthetic: VLCDR2 Ab16
ELSNRFS

SEQ ID NO: 193 - protein, 9 aa, Artificial Sequence
  Synthetic: VLCDR3 Ab16
MQYIEAPLT

SEQ ID NO: 194 - protein, 124 aa, Artificial Sequence
  Synthetic: VH Ab16
EVQLLESGGGVVQPGRSLRLSCAASGFTFSSYAMHWVRQAPGKGLEWVAVISYDGSNKYYADSVKGRFTISRDNSKNTLSLQMNSLRVEDTAIYYCVRGAGRGYTRGPDGFDIWGQGTMVTVSS

SEQ ID NO: 195 - protein, 112 aa, Artificial Sequence
  Synthetic: VL Ab16
DIVMTQTPLSLSVTPGQPASISCKSSRSLLHSDGKTYVYWYVQKSGQPPQLLIYELSNRFSGVPDRFSGSGSRTDFTLKISRVEAEDVGVYYCMQYIEAPLTFGGGTKVEIK

SEQ ID NO: 196 - protein, 446 aa, Artificial Sequence
  Synthetic: HC Ab16
EVQLLESGGGVVQPGRSLRLSCAASGFTFSSYAMHWVRQAPGKGLEWVAVISYDGSNKYYADSVKGRFTISRDNSKNTLSLQMNSLRVEDTAIYYCVRGAGRGYTRGPDGFDIWGQGTMVTVSSKGPSVFPLAPSSRSTSESTAALGCLVKDYFPEPVTVSWNSGALTSGVHTFPAVLQSSGLYSLSSVVTVPSSNFGTQTYTCNVDHKPSNTKVDKTVERKCCVECPPCPAPPVAGPSVFLFPPKPKDTLMISRTPEVTCVVVDVSHEDPEVQFNWYVDGVEVHNAKTKPREEQFNSTFRVVSVLTVVHQDWLNGKEYKCKVSNKGLPAPIEKTISKTKGQPREPQVYTLPPSREEMTKNQVSLTCLVKGFYPSDIAVEWESNGQPENNYKTTPPMLDSDGSFFLYSKLTVDKSRWQQGNVFSCSVMHEALHNHYTQKSLSLSPG

SEQ ID NO: 197 - protein, 219 aa, Artificial Sequence
  Synthetic: LC Ab16
DIVMTQTPLSLSVTPGQPASISCKSSRSLLHSDGKTYVYWYVQKSGQPPQLLIYELSNRFSGVPDRFSGSGSRTDFTLKISRVEAEDVGVYYCMQYIEAPLTFGGGTKVEIKRTVAAPSVFIFPPSDEQLKSGTASVVCLLNNFYPREAKVQWKVDNALQSGNSQESVTEQDSKDSTYSLSSTLTLSKADYEKHKVYACEVTHQGLSSPVTKSFNRGEC

SEQ ID NO: 198 - protein, 5 aa, Artificial Sequence
  Synthetic: VHCDR1 Ab17
SYAMH

SEQ ID NO: 199 - protein, 17 aa, Artificial Sequence
  Synthetic: VHCDR2 Ab17
VISYDGSNKYYADSVKG

SEQ ID NO: 200 - protein, 15 aa, Artificial Sequence
  Synthetic: VHCDR3 Ab17
GAGRGYTNGPDGFDI

SEQ ID NO: 201 - protein, 16 aa, Artificial Sequence
  Synthetic: VLCDR1 Ab17
KSSRSLLHSDGKTYVY

SEQ ID NO: 202 - protein, 7 aa, Artificial Sequence
  Synthetic: VLCDR2 Ab17
ELSNRFS

SEQ ID NO: 203 - protein, 9 aa, Artificial Sequence
  Synthetic: VLCDR3 Ab17
MQYIEAPLT

SEQ ID NO: 204 - protein, 124 aa, Artificial Sequence
  Synthetic: VH Ab17
EVQLLESGGGVVQPGRSLRLSCAASGFTFSSYAMHWVRQAPGKGLEWVAVISYDGSNKYYADSVKGRFTISRDNSKNTLSLQMNSLRVEDTAIYYCVRGAGRGYTNGPDGFDIWGQGTMVTVSS

SEQ ID NO: 205 - protein, 112 aa, Artificial Sequence; identical to SEQ ID NO: 195
  Synthetic: VL Ab17

SEQ ID NO: 206 - protein, 446 aa, Artificial Sequence
  Synthetic: HC Ab17
EVQLLESGGGVVQPGRSLRLSCAASGFTFSSYAMHWVRQAPGKGLEWVAVISYDGSNKYYADSVKGRFTISRDNSKNTLSLQMNSLRVEDTAIYYCVRGAGRGYTNGPDGFDIWGQGTMVTVSSKGPSVFPLAPSSRSTSESTAALGCLVKDYFPEPVTVSWNSGALTSGVHTFPAVLQSSGLYSLSSVVTVPSSNFGTQTYTCNVDHKPSNTKVDKTVERKCCVECPPCPAPPVAGPSVFLFPPKPKDTLMISRTPEVTCVVVDVSHEDPEVQFNWYVDGVEVHNAKTKPREEQFNSTFRVVSVLTVVHQDWLNGKEYKCKVSNKGLPAPIEKTISKTKGQPREPQVYTLPPSREEMTKNQVSLTCLVKGFYPSDIAVEWESNGQPENNYKTTPPMLDSDGSFFLYSKLTVDKSRWQQGNVFSCSVMHEALHNHYTQKSLSLSPG

SEQ ID NO: 207 - protein, 219 aa, Artificial Sequence; identical to SEQ ID NO: 197
  Synthetic: LC Ab17

SEQ ID NO: 208 - protein, 5 aa, Artificial Sequence
  Synthetic: VHCDR1 Ab18
SYAMH

SEQ ID NO: 209 - protein, 17 aa, Artificial Sequence
  Synthetic: VHCDR2 Ab18
VISYDGSNKYYADSVKG

SEQ ID NO: 210 - protein, 15 aa, Artificial Sequence
  Synthetic: VHCDR3 Ab18
GAGRGFTWGPDGFDI

SEQ ID NO: 211 - protein, 16 aa, Artificial Sequence
  Synthetic: VLCDR1 Ab18
KSSRSLLHSDGKTYVY

SEQ ID NO: 212 - protein, 7 aa, Artificial Sequence
  Synthetic: VLCDR2 Ab18
ELSNRFS

SEQ ID NO: 213 - protein, 9 aa, Artificial Sequence
  Synthetic: VLCDR3 Ab18
MQYIEAPLT

SEQ ID NO: 214 - protein, 124 aa, Artificial Sequence
  Synthetic: VH Ab18
EVQLLESGGGVVQPGRSLRLSCAASGFTFSSYAMHWVRQAPGKGLEWVAVISYDGSNKYYADSVKGRFTISRDNSKNTLSLQMNSLRVEDTAIYYCVRGAGRGFTWGPDGFDIWGQGTMVTVSS

SEQ ID NO: 215 - protein, 112 aa, Artificial Sequence; identical to SEQ ID NO: 195
  Synthetic: VL Ab18

SEQ ID NO: 216 - protein, 446 aa, Artificial Sequence
  Synthetic: HC Ab18
EVQLLESGGGVVQPGRSLRLSCAASGFTFSSYAMHWVRQAPGKGLEWVAVISYDGSNKYYADSVKGRFTISRDNSKNTLSLQMNSLRVEDTAIYYCVRGAGRGFTWGPDGFDIWGQGTMVTVSSKGPSVFPLAPSSRSTSESTAALGCLVKDYFPEPVTVSWNSGALTSGVHTFPAVLQSSGLYSLSSVVTVPSSNFGTQTYTCNVDHKPSNTKVDKTVERKCCVECPPCPAPPVAGPSVFLFPPKPKDTLMISRTPEVTCVVVDVSHEDPEVQFNWYVDGVEVHNAKTKPREEQFNSTFRVVSVLTVVHQDWLNGKEYKCKVSNKGLPAPIEKTISKTKGQPREPQVYTLPPSREEMTKNQVSLTCLVKGFYPSDIAVEWESNGQPENNYKTTPPMLDSDGSFFLYSKLTVDKSRWQQGNVFSCSVMHEALHNHYTQKSLSLSPG

SEQ ID NO: 217 - protein, 219 aa, Artificial Sequence; identical to SEQ ID NO: 197
  Synthetic: LC Ab18

SEQ ID NO: 218 - protein, 5 aa, Artificial Sequence
  Synthetic: VHCDR1 Ab19
SYAMH

SEQ ID NO: 219 - protein, 17 aa, Artificial Sequence
  Synthetic: VHCDR2 Ab19
VISYDGSNKYYADSVKG

SEQ ID NO: 220 - protein, 15 aa, Artificial Sequence
  Synthetic: VLCDR3 Ab19
GAGRGFTLGPDGFDI

SEQ ID NO: 221 - protein, 16 aa, Artificial Sequence
  Synthetic: VLCDR1 Ab19
KSSRSLLHSDGKTYVY

SEQ ID NO: 222 - protein, 7 aa, Artificial Sequence
  Synthetic: VLCDR2 Ab19
ELSNRFS

SEQ ID NO: 223 - protein, 9 aa, Artificial Sequence
  Synthetic: VLCDR3 Ab19
MQYIEAPLT

SEQ ID NO: 224 - protein, 124 aa, Artificial Sequence
  Synthetic: VH Ab19
EVQLLESGGGVVQPGRSLRLSCAASGFTFSSYAMHWVRQAPGKGLEWVAVISYDGSNKYYADSVKGRFTISRDNSKNTLSLQMNSLRVEDTAIYYCVRGAGRGFTLGPDGFDIWGQGTMVTVSS

SEQ ID NO: 225 - protein, 112 aa, Artificial Sequence; identical to SEQ ID NO: 195
  Synthetic: VL Ab19

SEQ ID NO: 226 - protein, 446 aa, Artificial Sequence
  Synthetic: HC Ab19
EVQLLESGGGVVQPGRSLRLSCAASGFTFSSYAMHWVRQAPGKGLEWVAVISYDGSNKYYADSVKGRFTISRDNSKNTLSLQMNSLRVEDTAIYYCVRGAGRGFTLGPDGFDIWGQGTMVTVSSKGPSVFPLAPSSRSTSESTAALGCLVKDYFPEPVTVSWNSGALTSGVHTFPAVLQSSGLYSLSSVVTVPSSNFGTQTYTCNVDHKPSNTKVDKTVERKCCVECPPCPAPPVAGPSVFLFPPKPKDTLMISRTPEVTCVVVDVSHEDPEVQFNWYVDGVEVHNAKTKPREEQFNSTFRVVSVLTVVHQDWLNGKEYKCKVSNKGLPAPIEKTISKTKGQPREPQVYTLPPSREEMTKNQVSLTCLVKGFYPSDIAVEWESNGQPENNYKTTPPMLDSDGSFFLYSKLTVDKSRWQQGNVFSCSVMHEALHNHYTQKSLSLSPG

SEQ ID NO: 227 - protein, 219 aa, Artificial Sequence; identical to SEQ ID NO: 197
  Synthetic: LC Ab19

SEQ ID NO: 228 - protein, 5 aa, Artificial Sequence
  Synthetic: VHCDR1 Ab20
SYAMH

SEQ ID NO: 229 - protein, 17 aa, Artificial Sequence
  Synthetic: VHCDR2 Ab20
VISYDGSNKYYADSVKG

SEQ ID NO: 230 - protein, 15 aa, Artificial Sequence
  Synthetic: VLCDR3 Ab20
GAGRGLTFGPDGFDI

SEQ ID NO: 231 - protein, 16 aa, Artificial Sequence
  Synthetic: VLCDR1 Ab20
KSSRSLLHSDGKTYVY

SEQ ID NO: 232 - protein, 7 aa, Artificial Sequence
  Synthetic: VLCDR2 Ab20
ELSNRFS

SEQ ID NO: 233 - protein, 9 aa, Artificial Sequence
  Synthetic: VLCDR3 Ab20
MQYIEAPLT

SEQ ID NO: 234 - protein, 124 aa, Artificial Sequence
  Synthetic: VH Ab20
EVQLLESGGGVVQPGRSLRLSCAASGFTFSSYAMHWVRQAPGKGLEWVAVISYDGSNKYYADSVKGRFTISRDNSKNTLSLQMNSLRVEDTAIYYCVRGAGRGLTFGPDGFDIWGQGTMVTVSS

SEQ ID NO: 235 - protein, 112 aa, Artificial Sequence; identical to SEQ ID NO: 195
  Synthetic: VL Ab20

SEQ ID NO: 236 - protein, 446 aa, Artificial Sequence
  Synthetic: HC Ab20
EVQLLESGGGVVQPGRSLRLSCAASGFTFSSYAMHWVRQAPGKGLEWVAVISYDGSNKYYADSVKGRFTISRDNSKNTLSLQMNSLRVEDTAIYYCVRGAGRGLTFGPDGFDIWGQGTMVTVSSKGPSVFPLAPSSRSTSESTAALGCLVKDYFPEPVTVSWNSGALTSGVHTFPAVLQSSGLYSLSSVVTVPSSNFGTQTYTCNVDHKPSNTKVDKTVERKCCVECPPCPAPPVAGPSVFLFPPKPKDTLMISRTPEVTCVVVDVSHEDPEVQFNWYVDGVEVHNAKTKPREEQFNSTFRVVSVLTVVHQDWLNGKEYKCKVSNKGLPAPIEKTISKTKGQPREPQVYTLPPSREEMTKNQVSLTCLVKGFYPSDIAVEWESNGQPENNYKTTPPMLDSDGSFFLYSKLTVDKSRWQQGNVFSCSVMHEALHNHYTQKSLSLSPG

SEQ ID NO: 237 - protein, 219 aa, Artificial Sequence; identical to SEQ ID NO: 197
  Synthetic: LC Ab20

SEQ ID NO: 238 - protein, 5 aa, Artificial Sequence
  Synthetic: VHCDR1 Ab21
SYAMH

SEQ ID NO: 239 - protein, 17 aa, Artificial Sequence
  Synthetic: VHCDR2 Ab21
VISYDGSNKYYADSVKG

SEQ ID NO: 240 - protein, 15 aa, Artificial Sequence
  Synthetic: VLCDR3 Ab21
GAGLGWPYGPDGFDI

SEQ ID NO: 241 - protein, 16 aa, Artificial Sequence
  Synthetic: VLCDR1 Ab21
KSSRSLLHSDGKTYVY

SEQ ID NO: 242 - protein, 7 aa, Artificial Sequence
  Synthetic: VLCDR2 Ab21
ELSNRFS

SEQ ID NO: 243 - protein, 9 aa, Artificial Sequence
  Synthetic: VLCDR3 Ab21
MQYIEAPLT

SEQ ID NO: 244 - protein, 124 aa, Artificial Sequence
  Synthetic: VH Ab21
EVQLLESGGGVVQPGRSLRLSCAASGFTFSSYAMHWVRQAPGKGLEWVAVISYDGSNKYYADSVKGRFTISRDNSKNTLSLQMNSLRVEDTAIYYCVRGAGLGWPYGPDGFDIWGQGTMVTVSS

SEQ ID NO: 245 - protein, 112 aa, Artificial Sequence; identical to SEQ ID NO: 195
  Synthetic: VL Ab21

SEQ ID NO: 246 - protein, 446 aa, Artificial Sequence
  Synthetic: HC Ab21
EVQLLESGGGVVQPGRSLRLSCAASGFTFSSYAMHWVRQAPGKGLEWVAVISYDGSNKYYADSVKGRFTISRDNSKNTLSLQMNSLRVEDTAIYYCVRGAGLGWPYGPDGFDIWGQGTMVTVSSKGPSVFPLAPSSRSTSESTAALGCLVKDYFPEPVTVSWNSGALTSGVHTFPAVLQSSGLYSLSSVVTVPSSNFGTQTYTCNVDHKPSNTKVDKTVERKCCVECPPCPAPPVAGPSVFLFPPKPKDTLMISRTPEVTCVVVDVSHEDPEVQFNWYVDGVEVHNAKTKPREEQFNSTFRVVSVLTVVHQDWLNGKEYKCKVSNKGLPAPIEKTISKTKGQPREPQVYTLPPSREEMTKNQVSLTCLVKGFYPSDIAVEWESNGQPENNYKTTPPMLDSDGSFFLYSKLTVDKSRWQQGNVFSCSVMHEALHNHYTQKSLSLSPG

SEQ ID NO: 247 - protein, 219 aa, Artificial Sequence; identical to SEQ ID NO: 197
  Synthetic: LC Ab21

SEQ ID NO: 248 - protein, 5 aa, Artificial Sequence
  Synthetic: VHCDR1 Ab22
SYAMH

SEQ ID NO: 249 - protein, 17 aa, Artificial Sequence
  Synthetic: VHCDR2 Ab22
VISYDGSNKYYADSVKG

SEQ ID NO: 250 - protein, 15 aa, Artificial Sequence
  Synthetic: VLCDR3 Ab22
GAGRGFTKGPDGFDI

SEQ ID NO: 251 - protein, 16 aa, Artificial Sequence
  Synthetic: VLCDR1 Ab22
KSSRSLLHSDGKTYVY

SEQ ID NO: 252 - protein, 7 aa, Artificial Sequence
  Synthetic: VLCDR2 Ab22
ELSNRFS

SEQ ID NO: 253 - protein, 9 aa, Artificial Sequence
  Synthetic: VLCDR3 Ab22
MQYIEAPLT

SEQ ID NO: 254 - protein, 124 aa, Artificial Sequence
  Synthetic: VH Ab22
EVQLLESGGGVVQPGRSLRLSCAASGFTFSSYAMHWVRQAPGKGLEWVAVISYDGSNKYYADSVKGRFTISRDNSKNTLSLQMNSLRVEDTAIYYCVRGAGRGFTKGPDGFDIWGQGTMVTVSS

SEQ ID NO: 255 - protein, 112 aa, Artificial Sequence; identical to SEQ ID NO: 195
  Synthetic: VL Ab22

SEQ ID NO: 256 - protein, 446 aa, Artificial Sequence
  Synthetic: HC Ab22
EVQLLESGGGVVQPGRSLRLSCAASGFTFSSYAMHWVRQAPGKGLEWVAVISYDGSNKYYADSVKGRFTISRDNSKNTLSLQMNSLRVEDTAIYYCVRGAGRGFTKGPDGFDIWGQGTMVTVSSKGPSVFPLAPSSRSTSESTAALGCLVKDYFPEPVTVSWNSGALTSGVHTFPAVLQSSGLYSLSSVVTVPSSNFGTQTYTCNVDHKPSNTKVDKTVERKCCVECPPCPAPPVAGPSVFLFPPKPKDTLMISRTPEVTCVVVDVSHEDPEVQFNWYVDGVEVHNAKTKPREEQFNSTFRVVSVLTVVHQDWLNGKEYKCKVSNKGLPAPIEKTISKTKGQPREPQVYTLPPSREEMTKNQVSLTCLVKGFYPSDIAVEWESNGQPENNYKTTPPMLDSDGSFFLYSKLTVDKSRWQQGNVFSCSVMHEALHNHYTQKSLSLSPG

SEQ ID NO: 257 - protein, 219 aa, Artificial Sequence; identical to SEQ ID NO: 197
  Synthetic: LC Ab22

SEQ ID NO: 258 - protein, 5 aa, Artificial Sequence
  Synthetic: VHCDR1 Ab23
SYAMH

SEQ ID NO: 259 - protein, 17 aa, Artificial Sequence
  Synthetic: VHCDR2 Ab23
VISYDGSNKYYADSVKG

SEQ ID NO: 260 - protein, 15 aa, Artificial Sequence
  Synthetic: VLCDR3 Ab23
GAGRGLTYGPDGFDI

SEQ ID NO: 261 - protein, 16 aa, Artificial Sequence
  Synthetic: VLCDR1 Ab23
KSSRSLLHSDGKTYVY

SEQ ID NO: 262 - protein, 7 aa, Artificial Sequence
  Synthetic: VLCDR2 Ab23
ELSNRFS

SEQ ID NO: 263 - protein, 9 aa, Artificial Sequence
  Synthetic: VLCDR3 Ab23
MQYIEAPLT

SEQ ID NO: 264 - protein, 124 aa, Artificial Sequence
  Synthetic: VH Ab23
EVQLLESGGGVVQPGRSLRLSCAASGFTFSSYAMHWVRQAPGKGLEWVAVISYDGSNKYYADSVKGRFTISRDNSKNTLSLQMNSLRVEDTAIYYCVRGAGRGLTYGPDGFDIWGQGTMVTVSS

SEQ ID NO: 265 - protein, 112 aa, Artificial Sequence; identical to SEQ ID NO: 195
  Synthetic: VL Ab23

SEQ ID NO: 266 - protein, 446 aa, Artificial Sequence
  Synthetic: HC Ab23
EVQLLESGGGVVQPGRSLRLSCAASGFTFSSYAMHWVRQAPGKGLEWVAVISYDGSNKYYADSVKGRFTISRDNSKNTLSLQMNSLRVEDTAIYYCVRGAGRGLTYGPDGFDIWGQGTMVTVSSKGPSVFPLAPSSRSTSESTAALGCLVKDYFPEPVTVSWNSGALTSGVHTFPAVLQSSGLYSLSSVVTVPSSNFGTQTYTCNVDHKPSNTKVDKTVERKCCVECPPCPAPPVAGPSVFLFPPKPKDTLMISRTPEVTCVVVDVSHEDPEVQFNWYVDGVEVHNAKTKPREEQFNSTFRVVSVLTVVHQDWLNGKEYKCKVSNKGLPAPIEKTISKTKGQPREPQVYTLPPSREEMTKNQVSLTCLVKGFYPSDIAVEWESNGQPENNYKTTPPMLDSDGSFFLYSKLTVDKSRWQQGNVFSCSVMHEALHNHYTQKSLSLSPG

SEQ ID NO: 267 - protein, 112 aa, Artificial Sequence; identical to SEQ ID NO: 195
  Synthetic: LC Ab23

SEQ ID NO: 268 - protein, 5 aa, Artificial Sequence
  Synthetic: VHCDR1 Ab24
SYAMH

SEQ ID NO: 269 - protein, 17 aa, Artificial Sequence
  Synthetic: VHCDR2 Ab24
VISYDGSNKYYADSVKG

SEQ ID NO: 270 - protein, 15 aa, Artificial Sequence
  Synthetic: VLCDR3 Ab24
GAGRGLIYGPDGFDI

SEQ ID NO: 271 - protein, 16 aa, Artificial Sequence
  Synthetic: VLCDR1 Ab24
KSSRSLLHSDGKTYVY

SEQ ID NO: 272 - protein, 7 aa, Artificial Sequence
  Synthetic: VLCDR2 Ab24
ELSNRFS

SEQ ID NO: 273 - protein, 9 aa, Artificial Sequence
  Synthetic: VLCDR3 Ab24
MQYIEAPLT

SEQ ID NO: 274 - protein, 124 aa, Artificial Sequence
  Synthetic: VH Ab24
EVQLLESGGGVVQPGRSLRLSCAASGFTFSSYAMHWVRQAPGKGLEWVAVISYDGSNKYYADSVKGRFTISRDNSKNTLSLQMNSLRVEDTAIYYCVRGAGRGLIYGPDGFDIWGQGTMVTVSS

SEQ ID NO: 275 - protein, 112 aa, Artificial Sequence; identical to SEQ ID NO: 195
  Synthetic: VL Ab24

SEQ ID NO: 276 - protein, 446 aa, Artificial Sequence
  Synthetic: HC Ab24
EVQLLESGGGVVQPGRSLRLSCAASGFTFSSYAMHWVRQAPGKGLEWVAVISYDGSNKYYADSVKGRFTISRDNSKNTLSLQMNSLRVEDTAIYYCVRGAGRGLIYGPDGFDIWGQGTMVTVSSKGPSVFPLAPSSRSTSESTAALGCLVKDYFPEPVTVSWNSGALTSGVHTFPAVLQSSGLYSLSSVVTVPSSNFGTQTYTCNVDHKPSNTKVDKTVERKCCVECPPCPAPPVAGPSVFLFPPKPKDTLMISRTPEVTCVVVDVSHEDPEVQFNWYVDGVEVHNAKTKPREEQFNSTFRVVSVLTVVHQDWLNGKEYKCKVSNKGLPAPIEKTISKTKGQPREPQVYTLPPSREEMTKNQVSLTCLVKGFYPSDIAVEWESNGQPENNYKTTPPMLDSDGSFFLYSKLTVDKSRWQQGNVFSCSVMHEALHNHYTQKSLSLSPG

SEQ ID NO: 277 - protein, 112 aa, Artificial Sequence; identical to SEQ ID NO: 195
  Synthetic: LC Ab24

SEQ ID NO: 278 - protein, 5 aa, Artificial Sequence
  Synthetic: VHCDR1 Ab25
SYAMH

SEQ ID NO: 279 - protein, 17 aa, Artificial Sequence
  Synthetic: VHCDR2 Ab25
VISYDGSNKYYADSVKG

SEQ ID NO: 280 - protein, 15 aa, Artificial Sequence
  Synthetic: VLCDR3 Ab25
GAGLGFTYGPDGFDI

SEQ ID NO: 281 - protein, 16 aa, Artificial Sequence
  Synthetic: VLCDR1 Ab25
KSSRSLLHSDGKTYVY

SEQ ID NO: 282 - protein, 7 aa, Artificial Sequence
  Synthetic: VLCDR2 Ab25
ELSNRFS

SEQ ID NO: 283 - protein, 9 aa, Artificial Sequence
  Synthetic: VLCDR3 Ab25
MQYIEAPLT

SEQ ID NO: 284 - protein, 124 aa, Artificial Sequence
  Synthetic: VH Ab25
EVQLLESGGGVVQPGRSLRLSCAASGFTFSSYAMHWVRQAPGKGLEWVAVISYDGSNKYYADSVKGRFTISRDNSKNTLSLQMNSLRVEDTAIYYCVRGAGLGFTYGPDGFDIWGQGTMVTVSS

SEQ ID NO: 285 - protein, 112 aa, Artificial Sequence; identical to SEQ ID NO: 195
  Synthetic: VL Ab25

SEQ ID NO: 286 - protein, 446 aa, Artificial Sequence
  Synthetic: HC Ab25
EVQLLESGGGVVQPGRSLRLSCAASGFTFSSYAMHWVRQAPGKGLEWVAVISYDGSNKYYADSVKGRFTISRDNSKNTLSLQMNSLRVEDTAIYYCVRGAGLGFTYGPDGFDIWGQGTMVTVSSKGPSVFPLAPSSRSTSESTAALGCLVKDYFPEPVTVSWNSGALTSGVHTFPAVLQSSGLYSLSSVVTVPSSNFGTQTYTCNVDHKPSNTKVDKTVERKCCVECPPCPAPPVAGPSVFLFPPKPKDTLMISRTPEVTCVVVDVSHEDPEVQFNWYVDGVEVHNAKTKPREEQFNSTFRVVSVLTVVHQDWLNGKEYKCKVSNKGLPAPIEKTISKTKGQPREPQVYTLPPSREEMTKNQVSLTCLVKGFYPSDIAVEWESNGQPENNYKTTPPMLDSDGSFFLYSKLTVDKSRWQQGNVFSCSVMHEALHNHYTQKSLSLSPG

SEQ ID NO: 287 - protein, 219 aa, Artificial Sequence; identical to SEQ ID NO: 197
  Synthetic: LC Ab25

SEQ ID NO: 288 - protein, 5 aa, Artificial Sequence
  Synthetic: VHCDR1 Ab26
SYAMH

SEQ ID NO: 289 - protein, 17 aa, Artificial Sequence
  Synthetic: VHCDR2 Ab26
VISYDGSNKYYADSVKG

SEQ ID NO: 290 - protein, 15 aa, Artificial Sequence
  Synthetic: VLCDR3 Ab26
GAGQGLSYGPDGFDI

SEQ ID NO: 291 - protein, 16 aa, Artificial Sequence
  Synthetic: VLCDR1 Ab26
KSSRSLLHSDGKTYVY

SEQ ID NO: 292 - protein, 7 aa, Artificial Sequence
  Synthetic: VLCDR2 Ab26
ELSNRFS

SEQ ID NO: 293 - protein, 9 aa, Artificial Sequence
  Synthetic: VLCDR3 Ab26
MQYIEAPLT

SEQ ID NO: 294 - protein, 124 aa, Artificial Sequence
  Synthetic: VH Ab26
EVQLLESGGGVVQPGRSLRLSCAASGFTFSSYAMHWVRQAPGKGLEWVAVISYDGSNKYYADSVKGRFTISRDNSKNTLSLQMNSLRVEDTAIYYCVRGAGQGLSYGPDGFDIWGQGTMVTVSS

SEQ ID NO: 295 - protein, 112 aa, Artificial Sequence; identical to SEQ ID NO: 195
  Synthetic: VL Ab26

SEQ ID NO: 296 - protein, 446 aa, Artificial Sequence
  Synthetic: HC Ab26
EVQLLESGGGVVQPGRSLRLSCAASGFTFSSYAMHWVRQAPGKGLEWVAVISYDGSNKYYADSVKGRFTISRDNSKNTLSLQMNSLRVEDTAIYYCVRGAGQGLSYGPDGFDIWGQGTMVTVSSKGPSVFPLAPSSRSTSESTAALGCLVKDYFPEPVTVSWNSGALTSGVHTFPAVLQSSGLYSLSSVVTVPSSNFGTQTYTCNVDHKPSNTKVDKTVERKCCVECPPCPAPPVAGPSVFLFPPKPKDTLMISRTPEVTCVVVDVSHEDPEVQFNWYVDGVEVHNAKTKPREEQFNSTFRVVSVLTVVHQDWLNGKEYKCKVSNKGLPAPIEKTISKTKGQPREPQVYTLPPSREEMTKNQVSLTCLVKGFYPSDIAVEWESNGQPENNYKTTPPMLDSDGSFFLYSKLTVDKSRWQQGNVFSCSVMHEALHNHYTQKSLSLSPG

SEQ ID NO: 297 - protein, 219 aa, Artificial Sequence; identical to SEQ ID NO: 197
  Synthetic: LC Ab26

SEQ ID NO: 298 - protein, 5 aa, Artificial Sequence
  Synthetic: VHCDR1 Ab27
SYAMH

SEQ ID NO: 299 - protein, 17 aa, Artificial Sequence
  Synthetic: VHCDR2 Ab27
VISYDGSNKYYADSVKG

SEQ ID NO: 300 - protein, 15 aa, Artificial Sequence
  Synthetic: VLCDR3 Ab27
GAGRGYTLGPDGFDI

SEQ ID NO: 301 - protein, 16 aa, Artificial Sequence
  Synthetic: VLCDR1 Ab27
KSSRSLLHSDGKTYVY

SEQ ID NO: 302 - protein, 7 aa, Artificial Sequence
  Synthetic: VLCDR2 Ab27
ELSNRFS

SEQ ID NO: 303 - protein, 9 aa, Artificial Sequence
  Synthetic: VLCDR3 Ab27
MQYIEAPLT

SEQ ID NO: 304 - protein, 124 aa, Artificial Sequence
  Synthetic: VH Ab27
EVQLLESGGGVVQPGRSLRLSCAASGFTFSSYAMHWVRQAPGKGLEWVAVISYDGSNKYYADSVKGRFTISRDNSKNTLSLQMNSLRVEDTAIYYCVRGAGRGYTLGPDGFDIWGQGTMVTVSS

SEQ ID NO: 305 - protein, 112 aa, Artificial Sequence; identical to SEQ ID NO: 195
  Synthetic: VL Ab27

SEQ ID NO: 306 - protein, 446 aa, Artificial Sequence
  Synthetic: HC Ab27
EVQLLESGGGVVQPGRSLRLSCAASGFTFSSYAMHWVRQAPGKGLEWVAVISYDGSNKYYADSVKGRFTISRDNSKNTLSLQMNSLRVEDTAIYYCVRGAGRGYTLGPDGFDIWGQGTMVTVSSKGPSVFPLAPSSRSTSESTAALGCLVKDYFPEPVTVSWNSGALTSGVHTFPAVLQSSGLYSLSSVVTVPSSNFGTQTYTCNVDHKPSNTKVDKTVERKCCVECPPCPAPPVAGPSVFLFPPKPKDTLMISRTPEVTCVVVDVSHEDPEVQFNWYVDGVEVHNAKTKPREEQFNSTFRVVSVLTVVHQDWLNGKEYKCKVSNKGLPAPIEKTISKTKGQPREPQVYTLPPSREEMTKNQVSLTCLVKGFYPSDIAVEWESNGQPENNYKTTPPMLDSDGSFFLYSKLTVDKSRWQQGNVFSCSVMHEALHNHYTQKSLSLSPG

SEQ ID NO: 307 - protein, 219 aa, Artificial Sequence; identical to SEQ ID NO: 197
  Synthetic: LC Ab27

SEQ ID NO: 308 - protein, 5 aa, Artificial Sequence
  Synthetic: VHCDR1 Ab28
SYAMH

SEQ ID NO: 309 - protein, 17 aa, Artificial Sequence
  Synthetic: VHCDR2 Ab28
VISYDGSNKYYADSVKG

SEQ ID NO: 310 - protein, 15 aa, Artificial Sequence
  Synthetic: VLCDR3 Ab28
GAGRGFTYGPDGFDI

SEQ ID NO: 311 - protein, 16 aa, Artificial Sequence
  Synthetic: VLCDR1 Ab28
KSSRSLLHSDGKTYVY

SEQ ID NO: 312 - protein, 7 aa, Artificial Sequence
  Synthetic: VLCDR2 Ab28
ELSNRFS

SEQ ID NO: 313 - protein, 9 aa, Artificial Sequence
  Synthetic: VLCDR3 Ab28
MQYIEAPLT

SEQ ID NO: 314 - protein, 124 aa, Artificial Sequence
  Synthetic: VH Ab28
EVQLLESGGGVVQPGRSLRLSCAASGFTFSSYAMHWVRQAPGKGLEWVAVISYDGSNKYYADSVKGRFTISRDNSKNTLSLQMNSLRVEDTAIYYCVRGAGRGFTYGPDGFDIWGQGTMVTVSS

SEQ ID NO: 315 - protein, 112 aa, Artificial Sequence; identical to SEQ ID NO: 195
  Synthetic: VL Ab28

SEQ ID NO: 316 - protein, 446 aa, Artificial Sequence
  Synthetic: HC Ab28
EVQLLESGGGVVQPGRSLRLSCAASGFTFSSYAMHWVRQAPGKGLEWVAVISYDGSNKYYADSVKGRFTISRDNSKNTLSLQMNSLRVEDTAIYYCVRGAGRGFTYGPDGFDIWGQGTMVTVSSKGPSVFPLAPSSRSTSESTAALGCLVKDYFPEPVTVSWNSGALTSGVHTFPAVLQSSGLYSLSSVVTVPSSNFGTQTYTCNVDHKPSNTKVDKTVERKCCVECPPCPAPPVAGPSVFLFPPKPKDTLMISRTPEVTCVVVDVSHEDPEVQFNWYVDGVEVHNAKTKPREEQFNSTFRVVSVLTVVHQDWLNGKEYKCKVSNKGLPAPIEKTISKTKGQPREPQVYTLPPSREEMTKNQVSLTCLVKGFYPSDIAVEWESNGQPENNYKTTPPMLDSDGSFFLYSKLTVDKSRWQQGNVFSCSVMHEALHNHYTQKSLSLSPG

SEQ ID NO: 317 - protein, 219 aa, Artificial Sequence; identical to SEQ ID NO: 197
  Synthetic: LC Ab28

SEQ ID NO: 318 - protein, 5 aa, Artificial Sequence
  Synthetic: VHCDR1 Ab29
SYAMH

SEQ ID NO: 319 - protein, 17 aa, Artificial Sequence
  Synthetic: VHCDR2 Ab29
VISYDGSNKYYADSVKG

SEQ ID NO: 320 - protein, 15 aa, Artificial Sequence
  Synthetic: VLCDR3 Ab29
GAGLGWPYGPDGFDI

SEQ ID NO: 321 - protein, 16 aa, Artificial Sequence
  Synthetic: VLCDR1 Ab29
TSSRSLLHSDGKTYVY

SEQ ID NO: 322 - protein, 7 aa, Artificial Sequence
  Synthetic: VLCDR2 Ab29
ELSNRFS

SEQ ID NO: 323 - protein, 9 aa, Artificial Sequence
  Synthetic: VLCDR3 Ab29
MQYVEAPLT

SEQ ID NO: 324 - protein, 124 aa, Artificial Sequence; identical to SEQ ID NO: 244
  Synthetic: VH Ab29

SEQ ID NO: 325 - protein, 112 aa, Artificial Sequence
  Synthetic: VL Ab29
DIVMTQTPLSLSVTPGQPASISCTSSRSLLHSDGKTYVYWYVQKSGQPPQLLIYELSNRFSGVPDRFSGSGSRTDFTLKISRVEAEDVGVYYCMQYVEAPLTFGGGTKVEIK

SEQ ID NO: 326 - protein, 446 aa, Artificial Sequence; identical to SEQ ID NO: 246
  Synthetic: HC Ab29

SEQ ID NO: 327 - protein, 219 aa, Artificial Sequence
  Synthetic: LC Ab29
DIVMTQTPLSLSVTPGQPASISCTSSRSLLHSDGKTYVYWYVQKSGQPPQLLIYELSNRFSGVPDRFSGSGSRTDFTLKISRVEAEDVGVYYCMQYVEAPLTFGGGTKVEIKRTVAAPSVFIFPPSDEQLKSGTASVVCLLNNFYPREAKVQWKVDNALQSGNSQESVTEQDSKDSTYSLSSTLTLSKADYEKHKVYACEVTHQGLSSPVTKSFNRGEC

SEQ ID NO: 328 - protein, 5 aa, Artificial Sequence
  Synthetic: VHCDR1 Ab30
SYAMH

SEQ ID NO: 329 - protein, 17 aa, Artificial Sequence
  Synthetic: VHCDR2 Ab30
VISYDGSNKYYADSVKG

SEQ ID NO: 330 - protein, 15 aa, Artificial Sequence
  Synthetic: VLCDR3 Ab30
GAGRGFTWGPDGFDI

SEQ ID NO: 331 - protein, 16 aa, Artificial Sequence
  Synthetic: VLCDR1 Ab30
TSSRSLLHSDGKTYVY

SEQ ID NO: 332 - protein, 7 aa, Artificial Sequence
  Synthetic: VLCDR2 Ab30
ELSNRFS

SEQ ID NO: 333 - protein, 9 aa, Artificial Sequence
  Synthetic: VLCDR3 Ab30
MQYVEAPLT

SEQ ID NO: 334 - protein, 124 aa, Artificial Sequence; identical to SEQ ID NO: 214
  Synthetic: VH Ab30

SEQ ID NO: 335 - protein, 112 aa, Artificial Sequence; identical to SEQ ID NO: 325
  Synthetic: VL Ab30

SEQ ID NO: 336 - protein, 446 aa, Artificial Sequence; identical to SEQ ID NO: 216
  Synthetic: HC Ab30

SEQ ID NO: 337 - protein, 219 aa, Artificial Sequence; identical to SEQ ID NO: 327
  Synthetic: LC Ab30

SEQ ID NO: 338 - protein, 5 aa, Artificial Sequence
  Synthetic: VHCDR1 Ab31
SYAMH

SEQ ID NO: 339 - protein, 17 aa, Artificial Sequence
  Synthetic: VHCDR2 Ab31
VISYDGSNKYYADSVKG

SEQ ID NO: 340 - protein, 15 aa, Artificial Sequence
  Synthetic: VLCDR3 Ab31
GAGRGLTYGPDGFDI

SEQ ID NO: 341 - protein, 16 aa, Artificial Sequence
  Synthetic: VLCDR1 Ab31
TSSRSLLHSDGKTYVY

SEQ ID NO: 342 - protein, 7 aa, Artificial Sequence
  Synthetic: VLCDR2 Ab31
ELSNRFS

SEQ ID NO: 343 - protein, 9 aa, Artificial Sequence
  Synthetic: VLCDR3 Ab31
MQYVEAPLT

SEQ ID NO: 344 - protein, 124 aa, Artificial Sequence; identical to SEQ ID NO: 264
  Synthetic: VH Ab31

SEQ ID NO: 345 - protein, 112 aa, Artificial Sequence; identical to SEQ ID NO: 325
  Synthetic: VL Ab31

SEQ ID NO: 346 - protein, 446 aa, Artificial Sequence; identical to SEQ ID NO: 266
  Synthetic: HC Ab31

SEQ ID NO: 347 - protein, 219 aa, Artificial Sequence; identical to SEQ ID NO: 327
  Synthetic: LC Ab31

SEQ ID NO: 348 - protein, 5 aa, Artificial Sequence
  Synthetic: VHCDR1 Ab32
SYAMH

SEQ ID NO: 349 - protein, 17 aa, Artificial Sequence
  Synthetic: VHCDR2 Ab32
VISYDGSNKYYADSVKG

SEQ ID NO: 350 - protein, 15 aa, Artificial Sequence
  Synthetic: VLCDR3 Ab32
GAGLGFTYGPDGFDI

SEQ ID NO: 351 - protein, 16 aa, Artificial Sequence
  Synthetic: VLCDR1 Ab32
TSSRSLLHSDGKTYVY

SEQ ID NO: 352 - protein, 7 aa, Artificial Sequence
  Synthetic: VLCDR2 Ab32
ELSNRFS

SEQ ID NO: 353 - protein, 9 aa, Artificial Sequence
  Synthetic: VLCDR3 Ab32
MQYVEAPLT

SEQ ID NO: 354 - protein, 124 aa, Artificial Sequence; identical to SEQ ID NO: 284
  Synthetic: VH Ab32

SEQ ID NO: 355 - protein, 112 aa, Artificial Sequence; identical to SEQ ID NO: 325
  Synthetic: VL Ab32

SEQ ID NO: 356 - protein, 446 aa, Artificial Sequence; identical to SEQ ID NO: 286
  Synthetic: HC Ab32

SEQ ID NO: 357 - protein, 219 aa, Artificial Sequence; identical to SEQ ID NO: 327
  Synthetic: LC Ab32

SEQ ID NO: 358 - protein, 5 aa, Artificial Sequence
  Synthetic: VHCDR1 Ab33
SYAMH

SEQ ID NO: 359 - protein, 17 aa, Artificial Sequence
  Synthetic: VHCDR2 Ab33
VISYDGSNKYYADSVKG

SEQ ID NO: 360 - protein, 15 aa, Artificial Sequence
  Synthetic: VLCDR3 Ab33
GAGQGLSYGPDGFDI

SEQ ID NO: 361 - protein, 16 aa, Artificial Sequence
  Synthetic: VLCDR1 Ab33
TSSRSLLHSDGKTYVY

SEQ ID NO: 362 - protein, 7 aa, Artificial Sequence
  Synthetic: VLCDR2 Ab33
ELSNRFS

SEQ ID NO: 363 - protein, 9 aa, Artificial Sequence
  Synthetic: VLCDR3 Ab33
MQYVEAPLT

SEQ ID NO: 364 - protein, 124 aa, Artificial Sequence; identical to SEQ ID NO: 294
  Synthetic: VH Ab33

SEQ ID NO: 365 - protein, 112 aa, Artificial Sequence; identical to SEQ ID NO: 325
  Synthetic: VL Ab33

SEQ ID NO: 366 - protein, 446 aa, Artificial Sequence; identical to SEQ ID NO: 296
  Synthetic: HC Ab33

SEQ ID NO: 367 - protein, 219 aa, Artificial Sequence; identical to SEQ ID NO: 327
  Synthetic: LC Ab33

SEQ ID NO: 368 - protein, 5 aa, Artificial Sequence
  Synthetic: VHCDR1 Ab34
SYAMH

SEQ ID NO: 369 - protein, 17 aa, Artificial Sequence
  Synthetic: VHCDR2 Ab34
VISYDGSNKYYADSVKG

SEQ ID NO: 370 - protein, 15 aa, Artificial Sequence
  Synthetic: VLCDR3 Ab34
GAGRGYTRGPDGFDI

SEQ ID NO: 371 - protein, 16 aa, Artificial Sequence
  Synthetic: VLCDR1 Ab34
TSSRSLLHSDGKTYVY

SEQ ID NO: 372 - protein, 7 aa, Artificial Sequence
  Synthetic: VLCDR2 Ab34
ELSNRFS

SEQ ID NO: 373 - protein, 9 aa, Artificial Sequence
  Synthetic: VLCDR3 Ab34
MQYVEAPLT

SEQ ID NO: 374 - protein, 124 aa, Artificial Sequence; identical to SEQ ID NO: 194
  Synthetic: VH Ab34

SEQ ID NO: 375 - protein, 112 aa, Artificial Sequence; identical to SEQ ID NO: 325
  Synthetic: VL Ab34

SEQ ID NO: 376 - protein, 446 aa, Artificial Sequence; identical to SEQ ID NO: 196
  Synthetic: HC Ab34

SEQ ID NO: 377 - protein, 219 aa, Artificial Sequence; identical to SEQ ID NO: 327
  Synthetic: LC Ab34

SEQ ID NO: 378 - protein, 5 aa, Artificial Sequence
  Synthetic: VHCDR1 Ab35
SYAMH

SEQ ID NO: 379 - protein, 17 aa, Artificial Sequence
  Synthetic: VHCDR2 Ab35
VISYDGSNKYYADSVKG

SEQ ID NO: 380 - protein, 15 aa, Artificial Sequence
  Synthetic: VLCDR3 Ab35
GAGRGYTNGPDGFDI

SEQ ID NO: 381 - protein, 16 aa, Artificial Sequence
  Synthetic: VLCDR1 Ab35
TSSRSLLHSDGKTYVY

SEQ ID NO: 382 - protein, 7 aa, Artificial Sequence
  Synthetic: VLCDR2 Ab35
ELSNRFS

SEQ ID NO: 383 - protein, 9 aa, Artificial Sequence
  Synthetic: VLCDR3 Ab35
MQYVEAPLT

SEQ ID NO: 384 - protein, 124 aa, Artificial Sequence; identical to SEQ ID NO: 204
  Synthetic: VH Ab35

SEQ ID NO: 385 - protein, 112 aa, Artificial Sequence; identical to SEQ ID NO: 325
  Synthetic: VL Ab35

SEQ ID NO: 386 - protein, 446 aa, Artificial Sequence; identical to SEQ ID NO: 206
  Synthetic: HC Ab35

SEQ ID NO: 387 - protein, 219 aa, Artificial Sequence; identical to SEQ ID NO: 327
  Synthetic: LC Ab35

SEQ ID NO: 388 - protein, 5 aa, Artificial Sequence
  Synthetic: VHCDR1 Ab36
SYAMH

SEQ ID NO: 389 - protein, 17 aa, Artificial Sequence
  Synthetic: VHCDR2 Ab36
VISYDGSNKYYADSVKG

SEQ ID NO: 390 - protein, 15 aa, Artificial Sequence
  Synthetic: VLCDR3 Ab36
GAGRGFTYGPDGFDI

SEQ ID NO: 391 - protein, 16 aa, Artificial Sequence
  Synthetic: VLCDR1 Ab36
RSSRSLLHSDGKTYVY

SEQ ID NO: 392 - protein, 7 aa, Artificial Sequence
  Synthetic: VLCDR2 Ab36
ELSNRFS

SEQ ID NO: 393 - protein, 9 aa, Artificial Sequence
  Synthetic: VLCDR3 Ab36
MQYIEAPLT

SEQ ID NO: 394 - protein, 124 aa, Artificial Sequence; identical to SEQ ID NO: 314
  Synthetic: VH Ab36

SEQ ID NO: 395 - protein, 112 aa, Artificial Sequence
  Synthetic: VL Ab36
DIVMTQTPLSLSVTPGQPASISCRSSRSLLHSDGKTYVYWYVQKSGQPPQLLIYELSNRFSGVPDRFSGSGSRTDFTLKISRVEAEDVGVYYCMQYIEAPLTFGGGTKVEIK

SEQ ID NO: 396 - protein, 446 aa, Artificial Sequence; identical to SEQ ID NO: 316
  Synthetic: HC Ab36

SEQ ID NO: 397 - protein, 219 aa, Artificial Sequence
  Synthetic: LC Ab36
DIVMTQTPLSLSVTPGQPASISCRSSRSLLHSDGKTYVYWYVQKSGQPPQLLIYELSNRFSGVPDRFSGSGSRTDFTLKISRVEAEDVGVYYCMQYIEAPLTFGGGTKVEIKRTVAAPSVFIFPPSDEQLKSGTASVVCLLNNFYPREAKVQWKVDNALQSGNSQESVTEQDSKDSTYSLSSTLTLSKADYEKHKVYACEVTHQGLSSPVTKSFNRGEC

SEQ ID NO: 398 - protein, 5 aa, Artificial Sequence
  Synthetic: VHCDR1 Ab37
SYAMH

SEQ ID NO: 399 - protein, 17 aa, Artificial Sequence
  Synthetic: VHCDR2 Ab37
VISYDGSNKYYADSVKG

SEQ ID NO: 400 - protein, 15 aa, Artificial Sequence
  Synthetic: VLCDR3 Ab37
GAGRGLTYGPDGFDI

SEQ ID NO: 401 - protein, 16 aa, Artificial Sequence
  Synthetic: VLCDR1 Ab37
RSSRSLLHSDGKTYVY

SEQ ID NO: 402 - protein, 7 aa, Artificial Sequence
  Synthetic: VLCDR2 Ab37
ELSNRFS

SEQ ID NO: 403 - protein, 9 aa, Artificial Sequence
  Synthetic: VLCDR3 Ab37
MQYIEAPLT

SEQ ID NO: 404 - protein, 124 aa, Artificial Sequence; identical to SEQ ID NO: 264
  Synthetic: VH Ab37

SEQ ID NO: 405 - protein, 112 aa, Artificial Sequence; identical to SEQ ID NO: 395
  Synthetic: VL Ab37

SEQ ID NO: 406 - protein, 446 aa, Artificial Sequence; identical to SEQ ID NO: 266
  Synthetic: HC Ab37

SEQ ID NO: 407 - protein, 219 aa, Artificial Sequence; identical to SEQ ID NO: 397
  Synthetic: LC Ab37

SEQ ID NO: 408 - protein, 5 aa, Artificial Sequence
  Synthetic: VHCDR1 Ab38
SYAMH

SEQ ID NO: 409 - protein, 17 aa, Artificial Sequence
  Synthetic: VHCDR2 Ab38
VISYDGSNKYYADSVKG

SEQ ID NO: 410 - protein, 15 aa, Artificial Sequence
  Synthetic: VLCDR3 Ab38
GAGQGYPYGPDGFDI

SEQ ID NO: 411 - protein, 16 aa, Artificial Sequence
  Synthetic: VLCDR1 Ab38
RSSRSLLHSDGKTYVY

SEQ ID NO: 412 - protein, 7 aa, Artificial Sequence
  Synthetic: VLCDR2 Ab38
ELSNRFS

SEQ ID NO: 413 - protein, 9 aa, Artificial Sequence
  Synthetic: VLCDR3 Ab38
MQYIEAPLT

SEQ ID NO: 414 - protein, 124 aa, Artificial Sequence
  Synthetic: VH Ab38
EVQLLESGGGVVQPGRSLRLSCAASGFTFSSYAMHWVRQAPGKGLEWVAVISYDGSNKYYADSVKGRFTISRDNSKNTLSLQMNSLRVEDTAIYYCVRGAGQGYPYGPDGFDIWGQGTMVTVSS

SEQ ID NO: 415 - protein, 112 aa, Artificial Sequence; identical to SEQ ID NO: 395
  Synthetic: VL Ab38

SEQ ID NO: 416 - protein, 446 aa, Artificial Sequence
  Synthetic: HC Ab38
EVQLLESGGGVVQPGRSLRLSCAASGFTFSSYAMHWVRQAPGKGLEWVAVISYDGSNKYYADSVKGRFTISRDNSKNTLSLQMNSLRVEDTAIYYCVRGAGQGYPYGPDGFDIWGQGTMVTVSSKGPSVFPLAPSSRSTSESTAALGCLVKDYFPEPVTVSWNSGALTSGVHTFPAVLQSSGLYSLSSVVTVPSSNFGTQTYTCNVDHKPSNTKVDKTVERKCCVECPPCPAPPVAGPSVFLFPPKPKDTLMISRTPEVTCVVVDVSHEDPEVQFNWYVDGVEVHNAKTKPREEQFNSTFRVVSVLTVVHQDWLNGKEYKCKVSNKGLPAPIEKTISKTKGQPREPQVYTLPPSREEMTKNQVSLTCLVKGFYPSDIAVEWESNGQPENNYKTTPPMLDSDGSFFLYSKLTVDKSRWQQGNVFSCSVMHEALHNHYTQKSLSLSPG

SEQ ID NO: 417 - protein, 219 aa, Artificial Sequence; identical to SEQ ID NO: 397
  Synthetic: LC Ab38

SEQ ID NO: 418 - protein, 5 aa, Artificial Sequence
  Synthetic: VHCDR1 Ab39
SYAMH

SEQ ID NO: 419 - protein, 17 aa, Artificial Sequence
  Synthetic: VHCDR2 Ab39
VISYDGSNKYYADSVKG

SEQ ID NO: 420 - protein, 15 aa, Artificial Sequence
  Synthetic: VLCDR3 Ab39
GAGTGFTYGPDGFDI

SEQ ID NO: 421 - protein, 16 aa, Artificial Sequence
  Synthetic: VLCDR1 Ab39
RSSRSLLHSDGKTYVY

SEQ ID NO: 422 - protein, 7 aa, Artificial Sequence
  Synthetic: VLCDR2 Ab39
ELSNRFS

SEQ ID NO: 423 - protein, 9 aa, Artificial Sequence
  Synthetic: VLCDR3 Ab39
MQYIEAPLT

SEQ ID NO: 424 - protein, 124 aa, Artificial Sequence
  Synthetic: VH Ab39
EVQLLESGGGVVQPGRSLRLSCAASGFTFSSYAMHWVRQAPGKGLEWVAVISYDGSNKYYADSVKGRFTISRDNSKNTLSLQMNSLRVEDTAIYYCVRGAGTGFTYGPDGFDIWGQGTMVTVSS

SEQ ID NO: 425 - protein, 112 aa, Artificial Sequence; identical to SEQ ID NO: 395
  Synthetic: VL Ab39

SEQ ID NO: 426 - protein, 446 aa, Artificial Sequence
  Synthetic: HC Ab39
EVQLLESGGGVVQPGRSLRLSCAASGFTFSSYAMHWVRQAPGKGLEWVAVISYDGSNKYYADSVKGRFTISRDNSKNTLSLQMNSLRVEDTAIYYCVRGAGTGFTYGPDGFDIWGQGTMVTVSSKGPSVFPLAPSSRSTSESTAALGCLVKDYFPEPVTVSWNSGALTSGVHTFPAVLQSSGLYSLSSVVTVPSSNFGTQTYTCNVDHKPSNTKVDKTVERKCCVECPPCPAPPVAGPSVFLFPPKPKDTLMISRTPEVTCVVVDVSHEDPEVQFNWYVDGVEVHNAKTKPREEQFNSTFRVVSVLTVVHQDWLNGKEYKCKVSNKGLPAPIEKTISKTKGQPREPQVYTLPPSREEMTKNQVSLTCLVKGFYPSDIAVEWESNGQPENNYKTTPPMLDSDGSFFLYSKLTVDKSRWQQGNVFSCSVMHEALHNHYTQKSLSLSPG

SEQ ID NO: 427 - protein, 219 aa, Artificial Sequence; identical to SEQ ID NO: 397
  Synthetic: LC Ab39

SEQ ID NO: 428 - protein, 5 aa, Artificial Sequence
  Synthetic: VHCDR1 Ab40
SYAMH

SEQ ID NO: 429 - protein, 17 aa, Artificial Sequence
  Synthetic: VHCDR2 Ab40
VISYDGSNKYYADSVKG

SEQ ID NO: 430 - protein, 15 aa, Artificial Sequence
  Synthetic: VLCDR3 Ab40
GAGMGLTYGPDGFDI

SEQ ID NO: 431 - protein, 16 aa, Artificial Sequence
  Synthetic: VLCDR1 Ab40
RSSRSLLHSDGKTYVY

SEQ ID NO: 432 - protein, 7 aa, Artificial Sequence
  Synthetic: VLCDR2 Ab40
ELSNRFS

SEQ ID NO: 433 - protein, 9 aa, Artificial Sequence
  Synthetic: VLCDR3 Ab40
MQYIEAPLT

SEQ ID NO: 434 - protein, 124 aa, Artificial Sequence
  Synthetic: VH Ab40
EVQLLESGGGVVQPGRSLRLSCAASGFTFSSYAMHWVRQAPGKGLEWVAVISYDGSNKYYADSVKGRFTISRDNSKNTLSLQMNSLRVEDTAIYYCVRGAGMGLTYGPDGFDIWGQGTMVTVSS

SEQ ID NO: 435 - protein, 112 aa, Artificial Sequence; identical to SEQ ID NO: 395
  Synthetic: VL Ab40

SEQ ID NO: 436 - protein, 446 aa, Artificial Sequence
  Synthetic: HC Ab40
EVQLLESGGGVVQPGRSLRLSCAASGFTFSSYAMHWVRQAPGKGLEWVAVISYDGSNKYYADSVKGRFTISRDNSKNTLSLQMNSLRVEDTAIYYCVRGAGMGLTYGPDGFDIWGQGTMVTVSSKGPSVFPLAPSSRSTSESTAALGCLVKDYFPEPVTVSWNSGALTSGVHTFPAVLQSSGLYSLSSVVTVPSSNFGTQTYTCNVDHKPSNTKVDKTVERKCCVECPPCPAPPVAGPSVFLFPPKPKDTLMISRTPEVTCVVVDVSHEDPEVQFNWYVDGVEVHNAKTKPREEQFNSTFRVVSVLTVVHQDWLNGKEYKCKVSNKGLPAPIEKTISKTKGQPREPQVYTLPPSREEMTKNQVSLTCLVKGFYPSDIAVEWESNGQPENNYKTTPPMLDSDGSFFLYSKLTVDKSRWQQGNVFSCSVMHEALHNHYTQKSLSLSPG

SEQ ID NO: 437 - protein, 219 aa, Artificial Sequence; identical to SEQ ID NO: 397
  Synthetic: LC Ab40

SEQ ID NO: 438 - protein, 5 aa, Artificial Sequence
  Synthetic: VHCDR1 Ab41
SYAMH

SEQ ID NO: 439 - protein, 17 aa, Artificial Sequence
  Synthetic: VHCDR2 Ab41
VISYDGSNKYYADSVKG

SEQ ID NO: 440 - protein, 15 aa, Artificial Sequence
  Synthetic: VLCDR3 Ab41
GAGLGFPYGPDGFDI

SEQ ID NO: 441 - protein, 16 aa, Artificial Sequence
  Synthetic: VLCDR1 Ab41
RSSRSLLHSDGKTYVY

SEQ ID NO: 442 - protein, 7 aa, Artificial Sequence
  Synthetic: VLCDR2 Ab41
ELSNRFS

SEQ ID NO: 443 - protein, 9 aa, Artificial Sequence
  Synthetic: VLCDR3 Ab41
MQYIEAPLT

SEQ ID NO: 444 - protein, 124 aa, Artificial Sequence
  Synthetic: VH Ab41
EVQLLESGGGVVQPGRSLRLSCAASGFTFSSYAMHWVRQAPGKGLEWVAVISYDGSNKYYADSVKGRFTISRDNSKNTLSLQMNSLRVEDTAIYYCVRGAGLGFPYGPDGFDIWGQGTMVTVSS

SEQ ID NO: 445 - protein, 112 aa, Artificial Sequence; identical to SEQ ID NO: 395
  Synthetic: VL Ab41

SEQ ID NO: 446 - protein, 446 aa, Artificial Sequence
  Synthetic: HC Ab41
EVQLLESGGGVVQPGRSLRLSCAASGFTFSSYAMHWVRQAPGKGLEWVAVISYDGSNKYYADSVKGRFTISRDNSKNTLSLQMNSLRVEDTAIYYCVRGAGLGFPYGPDGFDIWGQGTMVTVSSKGPSVFPLAPSSRSTSESTAALGCLVKDYFPEPVTVSWNSGALTSGVHTFPAVLQSSGLYSLSSVVTVPSSNFGTQTYTCNVDHKPSNTKVDKTVERKCCVECPPCPAPPVAGPSVFLFPPKPKDTLMISRTPEVTCVVVDVSHEDPEVQFNWYVDGVEVHNAKTKPREEQFNSTFRVVSVLTVVHQDWLNGKEYKCKVSNKGLPAPIEKTISKTKGQPREPQVYTLPPSREEMTKNQVSLTCLVKGFYPSDIAVEWESNGQPENNYKTTPPMLDSDGSFFLYSKLTVDKSRWQQGNVFSCSVMHEALHNHYTQKSLSLSPG

SEQ ID NO: 447 - protein, 219 aa, Artificial Sequence; identical to SEQ ID NO: 397
  Synthetic: LC Ab41

SEQ ID NO: 448 - protein, 5 aa, Artificial Sequence
  Synthetic: VHCDR1 Ab42
SYAMH

SEQ ID NO: 449 - protein, 17 aa, Artificial Sequence
  Synthetic: VHCDR2 Ab42
VISYDGSNKYYADSVKG

SEQ ID NO: 450 - protein, 15 aa, Artificial Sequence
  Synthetic: VLCDR3 Ab42
GAGLGWAYGPDGFDI

SEQ ID NO: 451 - protein, 16 aa, Artificial Sequence
  Synthetic: VLCDR1 Ab42
RSSRSLLHSDGKTYVY

SEQ ID NO: 452 - protein, 7 aa, Artificial Sequence
  Synthetic: VLCDR2 Ab42
ELSNRFS

SEQ ID NO: 453 - protein, 9 aa, Artificial Sequence
  Synthetic: VLCDR3 Ab42
MQYIEAPLT

SEQ ID NO: 454 - protein, 124 aa, Artificial Sequence
  Synthetic: VH Ab42
EVQLLESGGGVVQPGRSLRLSCAASGFTFSSYAMHWVRQAPGKGLEWVAVISYDGSNKYYADSVKGRFTISRDNSKNTLSLQMNSLRVEDTAIYYCVRGAGLGWAYGPDGFDIWGQGTMVTVSS

SEQ ID NO: 455 - protein, 112 aa, Artificial Sequence; identical to SEQ ID NO: 395
  Synthetic: VL Ab42

SEQ ID NO: 456 - protein, 446 aa, Artificial Sequence
  Synthetic: HC Ab42
EVQLLESGGGVVQPGRSLRLSCAASGFTFSSYAMHWVRQAPGKGLEWVAVISYDGSNKYYADSVKGRFTISRDNSKNTLSLQMNSLRVEDTAIYYCVRGAGLGWAYGPDGFDIWGQGTMVTVSSKGPSVFPLAPSSRSTSESTAALGCLVKDYFPEPVTVSWNSGALTSGVHTFPAVLQSSGLYSLSSVVTVPSSNFGTQTYTCNVDHKPSNTKVDKTVERKCCVECPPCPAPPVAGPSVFLFPPKPKDTLMISRTPEVTCVVVDVSHEDPEVQFNWYVDGVEVHNAKTKPREEQFNSTFRVVSVLTVVHQDWLNGKEYKCKVSNKGLPAPIEKTISKTKGQPREPQVYTLPPSREEMTKNQVSLTCLVKGFYPSDIAVEWESNGQPENNYKTTPPMLDSDGSFFLYSKLTVDKSRWQQGNVFSCSVMHEALHNHYTQKSLSLSPG

SEQ ID NO: 457 - protein, 219 aa, Artificial Sequence; identical to SEQ ID NO: 397
  Synthetic: LC Ab42

SEQ ID NO: 458 - protein, 5 aa, Artificial Sequence
  Synthetic: VHCDR1 Ab43
SYAMH

SEQ ID NO: 459 - protein, 17 aa, Artificial Sequence
  Synthetic: VHCDR2 Ab43
VISYDGSNKYYADSVKG

SEQ ID NO: 460 - protein, 15 aa, Artificial Sequence
  Synthetic: VLCDR3 Ab43
GAGRGYPYGPDGFDI

SEQ ID NO: 461 - protein, 16 aa, Artificial Sequence
  Synthetic: VLCDR1 Ab43
RSSRSLLHSDGKTYVY

SEQ ID NO: 462 - protein, 7 aa, Artificial Sequence
  Synthetic: VLCDR2 Ab43
ELSNRFS

SEQ ID NO: 463 - protein, 9 aa, Artificial Sequence
  Synthetic: VLCDR3 Ab43
MQYIEAPLT

SEQ ID NO: 464 - protein, 124 aa, Artificial Sequence
  Synthetic: VH Ab43
EVQLLESGGGVVQPGRSLRLSCAASGFTFSSYAMHWVRQAPGKGLEWVAVISYDGSNKYYADSVKGRFTISRDNSKNTLSLQMNSLRVEDTAIYYCVRGAGRGYPYGPDGFDIWGQGTMVTVSS

SEQ ID NO: 465 - protein, 112 aa, Artificial Sequence; identical to SEQ ID NO: 395
  Synthetic: VL Ab43

SEQ ID NO: 466 - protein, 446 aa, Artificial Sequence
  Synthetic: HC Ab43
EVQLLESGGGVVQPGRSLRLSCAASGFTFSSYAMHWVRQAPGKGLEWVAVISYDGSNKYYADSVKGRFTISRDNSKNTLSLQMNSLRVEDTAIYYCVRGAGRGYPYGPDGFDIWGQGTMVTVSSKGPSVFPLAPSSRSTSESTAALGCLVKDYFPEPVTVSWNSGALTSGVHTFPAVLQSSGLYSLSSVVTVPSSNFGTQTYTCNVDHKPSNTKVDKTVERKCCVECPPCPAPPVAGPSVFLFPPKPKDTLMISRTPEVTCVVVDVSHEDPEVQFNWYVDGVEVHNAKTKPREEQFNSTFRVVSVLTVVHQDWLNGKEYKCKVSNKGLPAPIEKTISKTKGQPREPQVYTLPPSREEMTKNQVSLTCLVKGFYPSDIAVEWESNGQPENNYKTTPPMLDSDGSFFLYSKLTVDKSRWQQGNVFSCSVMHEALHNHYTQKSLSLSPG

SEQ ID NO: 467 - protein, 219 aa, Artificial Sequence; identical to SEQ ID NO: 397
  Synthetic: LC Ab43

SEQ ID NO: 468 - protein, 5 aa, Artificial Sequence
  Synthetic: VHCDR1 Ab44
GYAMH

SEQ ID NO: 469 - protein, 17 aa, Artificial Sequence
  Synthetic: VHCDR2 Ab44
VISYDGSNKYYADSVKG

SEQ ID NO: 470 - protein, 15 aa, Artificial Sequence
  Synthetic: VLCDR3 Ab44
GAGRGLTYGPDGFDI

SEQ ID NO: 471 - protein, 16 aa, Artificial Sequence
  Synthetic: VLCDR1 Ab44
RSSRSLLHSDGKTYVY

SEQ ID NO: 472 - protein, 7 aa, Artificial Sequence
  Synthetic: VLCDR2 Ab44
ELSNRFS

SEQ ID NO: 473 - protein, 9 aa, Artificial Sequence
  Synthetic: VLCDR3 Ab44
MQYIEAPLT

SEQ ID NO: 474 - protein, 124 aa, Artificial Sequence
  Synthetic: VH Ab44
EVQLLESGGGVVQPGRSLRLSCAASGFDFAGYAMHWVRQAPGKGLEWVAVISYDGSNKYYADSVKGRFTISRDNSKNTLSLQMNSLRVEDTAIYYCVRGAGRGLTYGPDGFDIWGQGTMVTVSS

SEQ ID NO: 475 - protein, 112 aa, Artificial Sequence; identical to SEQ ID NO: 395
  Synthetic: VL Ab44

SEQ ID NO: 476 - protein, 446 aa, Artificial Sequence
  Synthetic: HC Ab44
EVQLLESGGGVVQPGRSLRLSCAASGFDFAGYAMHWVRQAPGKGLEWVAVISYDGSNKYYADSVKGRFTISRDNSKNTLSLQMNSLRVEDTAIYYCVRGAGRGLTYGPDGFDIWGQGTMVTVSSKGPSVFPLAPSSRSTSESTAALGCLVKDYFPEPVTVSWNSGALTSGVHTFPAVLQSSGLYSLSSVVTVPSSNFGTQTYTCNVDHKPSNTKVDKTVERKCCVECPPCPAPPVAGPSVFLFPPKPKDTLMISRTPEVTCVVVDVSHEDPEVQFNWYVDGVEVHNAKTKPREEQFNSTFRVVSVLTVVHQDWLNGKEYKCKVSNKGLPAPIEKTISKTKGQPREPQVYTLPPSREEMTKNQVSLTCLVKGFYPSDIAVEWESNGQPENNYKTTPPMLDSDGSFFLYSKLTVDKSRWQQGNVFSCSVMHEALHNHYTQKSLSLSPG

SEQ ID NO: 477 - protein, 219 aa, Artificial Sequence; identical to SEQ ID NO: 397
  Synthetic: LC Ab44

SEQ ID NO: 478 - protein, 5 aa, Artificial Sequence
  Synthetic: VHCDR1 Ab45
SYAMH

SEQ ID NO: 479 - protein, 17 aa, Artificial Sequence
  Synthetic: VHCDR2 Ab45
VISYDGSNKYYADSVKG

SEQ ID NO: 480 - protein, 15 aa, Artificial Sequence
  Synthetic: VLCDR3 Ab45
GAGLGLTYGPDGFDI

SEQ ID NO: 481 - protein, 16 aa, Artificial Sequence
  Synthetic: VLCDR1 Ab45
RSSRSLLHSDGKTYVY

SEQ ID NO: 482 - protein, 7 aa, Artificial Sequence
  Synthetic: VLCDR2 Ab45
ELSNRFS

SEQ ID NO: 483 - protein, 9 aa, Artificial Sequence
  Synthetic: VLCDR3 Ab45
MQYIEAPLT

SEQ ID NO: 484 - protein, 124 aa, Artificial Sequence
  Synthetic: VH Ab45
EVQLLESGGGVVQPGRSLRLSCAASGFTFSSYAMHWVRQAPGKGLEWVAVISYDGSNKYYADSVKGRFTISRDNSKNTLSLQMNSLRVEDTAIYYCVRGAGLGLTYGPDGFDIWGQGTMVTVSS

SEQ ID NO: 485 - protein, 112 aa, Artificial Sequence; identical to SEQ ID NO: 395
  Synthetic: VL Ab45

SEQ ID NO: 486 - protein, 446 aa, Artificial Sequence
  Synthetic: HC Ab45
EVQLLESGGGVVQPGRSLRLSCAASGFTFSSYAMHWVRQAPGKGLEWVAVISYDGSNKYYADSVKGRFTISRDNSKNTLSLQMNSLRVEDTAIYYCVRGAGLGLTYGPDGFDIWGQGTMVTVSSKGPSVFPLAPSSRSTSESTAALGCLVKDYFPEPVTVSWNSGALTSGVHTFPAVLQSSGLYSLSSVVTVPSSNFGTQTYTCNVDHKPSNTKVDKTVERKCCVECPPCPAPPVAGPSVFLFPPKPKDTLMISRTPEVTCVVVDVSHEDPEVQFNWYVDGVEVHNAKTKPREEQFNSTFRVVSVLTVVHQDWLNGKEYKCKVSNKGLPAPIEKTISKTKGQPREPQVYTLPPSREEMTKNQVSLTCLVKGFYPSDIAVEWESNGQPENNYKTTPPMLDSDGSFFLYSKLTVDKSRWQQGNVFSCSVMHEALHNHYTQKSLSLSPG

SEQ ID NO: 487 - protein, 219 aa, Artificial Sequence; identical to SEQ ID NO: 397
  Synthetic: LC Ab45

SEQ ID NO: 488 - protein, 5 aa, Artificial Sequence
  Synthetic: VHCDR1 Ab46
SYAMH

SEQ ID NO: 489 - protein, 17 aa, Artificial Sequence
  Synthetic: VHCDR2 Ab46
VISYDGSNKYYADSVKG

SEQ ID NO: 490 - protein, 15 aa, Artificial Sequence
  Synthetic: VLCDR3 Ab46
GAGLGYPYGPDGFDI

SEQ ID NO: 491 - protein, 16 aa, Artificial Sequence
  Synthetic: VLCDR1 Ab46
RSSRSLLHSDGKTYVY

SEQ ID NO: 492 - protein, 7 aa, Artificial Sequence
  Synthetic: VLCDR2 Ab46
ELSNRFS

SEQ ID NO: 493 - protein, 9 aa, Artificial Sequence
  Synthetic: VLCDR3 Ab46
MQYIEAPLT

SEQ ID NO: 494 - protein, 124 aa, Artificial Sequence
  Synthetic: VH Ab46
EVQLLESGGGVVQPGRSLRLSCAASGFTFSSYAMHWVRQAPGKGLEWVAVISYDGSNKYYADSVKGRFTISRDNSKNTLSLQMNSLRVEDTAIYYCVRGAGLGYPYGPDGFDIWGQGTMVTVSS

SEQ ID NO: 495 - protein, 112 aa, Artificial Sequence; identical to SEQ ID NO: 395
  Synthetic: VL Ab46

SEQ ID NO: 496 - protein, 446 aa, Artificial Sequence
  Synthetic: HC Ab46
EVQLLESGGGVVQPGRSLRLSCAASGFTFSSYAMHWVRQAPGKGLEWVAVISYDGSNKYYADSVKGRFTISRDNSKNTLSLQMNSLRVEDTAIYYCVRGAGLGYPYGPDGFDIWGQGTMVTVSSKGPSVFPLAPSSRSTSESTAALGCLVKDYFPEPVTVSWNSGALTSGVHTFPAVLQSSGLYSLSSVVTVPSSNFGTQTYTCNVDHKPSNTKVDKTVERKCCVECPPCPAPPVAGPSVFLFPPKPKDTLMISRTPEVTCVVVDVSHEDPEVQFNWYVDGVEVHNAKTKPREEQFNSTFRVVSVLTVVHQDWLNGKEYKCKVSNKGLPAPIEKTISKTKGQPREPQVYTLPPSREEMTKNQVSLTCLVKGFYPSDIAVEWESNGQPENNYKTTPPMLDSDGSFFLYSKLTVDKSRWQQGNVFSCSVMHEALHNHYTQKSLSLSPG

SEQ ID NO: 497 - protein, 219 aa, Artificial Sequence; identical to SEQ ID NO: 397
  Synthetic: LC Ab46

SEQ ID NO: 498 - protein, 5 aa, Artificial Sequence
  Synthetic: VHCDR1 Ab47
SYAMH

SEQ ID NO: 499 - protein, 17 aa, Artificial Sequence
  Synthetic: VHCDR2 Ab47
VISYDGSNKYYADSVKG

SEQ ID NO: 500 - protein, 15 aa, Artificial Sequence
  Synthetic: VLCDR3 Ab47
GAGRGYPHGPDGFDI

SEQ ID NO: 501 - protein, 16 aa, Artificial Sequence
  Synthetic: VLCDR1 Ab47
RSSRSLLHSDGKTYVY

SEQ ID NO: 502 - protein, 7 aa, Artificial Sequence
  Synthetic: VLCDR2 Ab47
ELSNRFS

SEQ ID NO: 503 - protein, 9 aa, Artificial Sequence
  Synthetic: VLCDR3 Ab47
MQYIEAPLT

SEQ ID NO: 504 - protein, 124 aa, Artificial Sequence
  Synthetic: VH Ab47
EVQLLESGGGVVQPGRSLRLSCAASGFTFSSYAMHWVRQAPGKGLEWVAVISYDGSNKYYADSVKGRFTISRDNSKNTLSLQMNSLRVEDTAIYYCVRGAGRGYPHGPDGFDIWGQGTMVTVSS

SEQ ID NO: 505 - protein, 112 aa, Artificial Sequence; identical to SEQ ID NO: 395
  Synthetic: VL Ab47

SEQ ID NO: 506 - protein, 446 aa, Artificial Sequence
  Synthetic: HC Ab47
EVQLLESGGGVVQPGRSLRLSCAASGFTFSSYAMHWVRQAPGKGLEWVAVISYDGSNKYYADSVKGRFTISRDNSKNTLSLQMNSLRVEDTAIYYCVRGAGRGYPHGPDGFDIWGQGTMVTVSSKGPSVFPLAPSSRSTSESTAALGCLVKDYFPEPVTVSWNSGALTSGVHTFPAVLQSSGLYSLSSVVTVPSSNFGTQTYTCNVDHKPSNTKVDKTVERKCCVECPPCPAPPVAGPSVFLFPPKPKDTLMISRTPEVTCVVVDVSHEDPEVQFNWYVDGVEVHNAKTKPREEQFNSTFRVVSVLTVVHQDWLNGKEYKCKVSNKGLPAPIEKTISKTKGQPREPQVYTLPPSREEMTKNQVSLTCLVKGFYPSDIAVEWESNGQPENNYKTTPPMLDSDGSFFLYSKLTVDKSRWQQGNVFSCSVMHEALHNHYTQKSLSLSPG

SEQ ID NO: 507 - protein, 219 aa, Artificial Sequence; identical to SEQ ID NO: 397
  Synthetic: LC Ab47

SEQ ID NO: 508 - protein, 5 aa, Artificial Sequence
  Synthetic: VHCDR1 Ab48
SYAMH

SEQ ID NO: 509 - protein, 17 aa, Artificial Sequence
  Synthetic: VHCDR2 Ab48
VISYDGSNKYYADSVKG

SEQ ID NO: 510 - protein, 15 aa, Artificial Sequence
  Synthetic: VLCDR3 Ab48
GAGIGYPHGPDGFDI

SEQ ID NO: 511 - protein, 16 aa, Artificial Sequence
  Synthetic: VLCDR1 Ab48
RSSRSLLHSDGKTYVY

SEQ ID NO: 512 - protein, 7 aa, Artificial Sequence
  Synthetic: VLCDR2 Ab48
ELSNRFS

SEQ ID NO: 513 - protein, 9 aa, Artificial Sequence
  Synthetic: VLCDR3 Ab48
MQYIEAPLT

SEQ ID NO: 514 - protein, 124 aa, Artificial Sequence
  Synthetic: VH Ab48
EVQLLESGGGVVQPGRSLRLSCAASGFTFSSYAMHWVRQAPGKGLEWVAVISYDGSNKYYADSVKGRFTISRDNSKNTLSLQMNSLRVEDTAIYYCVRGAGIGYPHGPDGFDIWGQGTMVTVSS

SEQ ID NO: 515 - protein, 112 aa, Artificial Sequence; identical to SEQ ID NO: 395
  Synthetic: VL Ab48

SEQ ID NO: 516 - protein, 446 aa, Artificial Sequence
  Synthetic: HC Ab48
EVQLLESGGGVVQPGRSLRLSCAASGFTFSSYAMHWVRQAPGKGLEWVAVISYDGSNKYYADSVKGRFTISRDNSKNTLSLQMNSLRVEDTAIYYCVRGAGIGYPHGPDGFDIWGQGTMVTVSSKGPSVFPLAPSSRSTSESTAALGCLVKDYFPEPVTVSWNSGALTSGVHTFPAVLQSSGLYSLSSVVTVPSSNFGTQTYTCNVDHKPSNTKVDKTVERKCCVECPPCPAPPVAGPSVFLFPPKPKDTLMISRTPEVTCVVVDVSHEDPEVQFNWYVDGVEVHNAKTKPREEQFNSTFRVVSVLTVVHQDWLNGKEYKCKVSNKGLPAPIEKTISKTKGQPREPQVYTLPPSREEMTKNQVSLTCLVKGFYPSDIAVEWESNGQPENNYKTTPPMLDSDGSFFLYSKLTVDKSRWQQGNVFSCSVMHEALHNHYTQKSLSLSPG

SEQ ID NO: 517 - protein, 219 aa, Artificial Sequence; identical to SEQ ID NO: 397
  Synthetic: LC Ab48

SEQ ID NO: 518 - protein, 5 aa, Artificial Sequence
  Synthetic: VHCDR1 Ab49
SYAMH

SEQ ID NO: 519 - protein, 17 aa, Artificial Sequence
  Synthetic: VHCDR2 Ab49
VISYDGSNKYYADSVKG

SEQ ID NO: 520 - protein, 15 aa, Artificial Sequence
  Synthetic: VLCDR3 Ab49
GAGRGYPYGPDGFDI

SEQ ID NO: 521 - protein, 16 aa, Artificial Sequence
  Synthetic: VLCDR1 Ab49
RSSRSLLHSDGKTYVY

SEQ ID NO: 522 - protein, 7 aa, Artificial Sequence
  Synthetic: VLCDR2 Ab49
ELSNRFS

SEQ ID NO: 523 - protein, 9 aa, Artificial Sequence
  Synthetic: VLCDR3 Ab49
MQYIEAPLT

SEQ ID NO: 524 - protein, 124 aa, Artificial Sequence; identical to SEQ ID NO: 464
  Synthetic: VH Ab49

SEQ ID NO: 525 - protein, 112 aa, Artificial Sequence; identical to SEQ ID NO: 395
  Synthetic: VL Ab49

SEQ ID NO: 526 - protein, 446 aa, Artificial Sequence; identical to SEQ ID NO: 466
  Synthetic: HC Ab49

SEQ ID NO: 527 - protein, 219 aa, Artificial Sequence; identical to SEQ ID NO: 397
  Synthetic: LC Ab49

SEQ ID NO: 528 - protein, 5 aa, Artificial Sequence
  Synthetic: VHCDR1 Ab50
SYAMH

SEQ ID NO: 529 - protein, 17 aa, Artificial Sequence
  Synthetic: VHCDR2 Ab50
VISYDGSNKYYADSVKG

SEQ ID NO: 530 - protein, 15 aa, Artificial Sequence
  Synthetic: VLCDR3 Ab50
GAGLGFPFGPDGFDI

SEQ ID NO: 531 - protein, 16 aa, Artificial Sequence
  Synthetic: VLCDR1 Ab50
RSSRSLLHSDGKTYVY

SEQ ID NO: 532 - protein, 7 aa, Artificial Sequence
  Synthetic: VLCDR2 Ab50
ELSNRFS

SEQ ID NO: 533 - protein, 9 aa, Artificial Sequence
  Synthetic: VLCDR3 Ab50
MQYIEAPLT

SEQ ID NO: 534 - protein, 124 aa, Artificial Sequence
  Synthetic: VH Ab50
EVQLLESGGGVVQPGRSLRLSCAASGFTFSSYAMHWVRQAPGKGLEWVAVISYDGSNKYYADSVKGRFTISRDNSKNTLSLQMNSLRVEDTAIYYCVRGAGLGFPFGPDGFDIWGQGTMVTVSS

SEQ ID NO: 535 - protein, 112 aa, Artificial Sequence; identical to SEQ ID NO: 395
  Synthetic: VL Ab50

SEQ ID NO: 536 - protein, 446 aa, Artificial Sequence
  Synthetic: HC Ab50
EVQLLESGGGVVQPGRSLRLSCAASGFTFSSYAMHWVRQAPGKGLEWVAVISYDGSNKYYADSVKGRFTISRDNSKNTLSLQMNSLRVEDTAIYYCVRGAGLGFPFGPDGFDIWGQGTMVTVSSKGPSVFPLAPSSRSTSESTAALGCLVKDYFPEPVTVSWNSGALTSGVHTFPAVLQSSGLYSLSSVVTVPSSNFGTQTYTCNVDHKPSNTKVDKTVERKCCVECPPCPAPPVAGPSVFLFPPKPKDTLMISRTPEVTCVVVDVSHEDPEVQFNWYVDGVEVHNAKTKPREEQFNSTFRVVSVLTVVHQDWLNGKEYKCKVSNKGLPAPIEKTISKTKGQPREPQVYTLPPSREEMTKNQVSLTCLVKGFYPSDIAVEWESNGQPENNYKTTPPMLDSDGSFFLYSKLTVDKSRWQQGNVFSCSVMHEALHNHYTQKSLSLSPG

SEQ ID NO: 537 - protein, 219 aa, Artificial Sequence; identical to SEQ ID NO: 397
  Synthetic: LC Ab50

SEQ ID NO: 538 - protein, 5 aa, Artificial Sequence
  Synthetic: VHCDR1 Ab51
SYAMH

SEQ ID NO: 539 - protein, 17 aa, Artificial Sequence
  Synthetic: VHCDR2 Ab51
VISYDGSNKYYADSVKG

SEQ ID NO: 540 - protein, 15 aa, Artificial Sequence
  Synthetic: VLCDR3 Ab51
GAGRGFPYGPDGFDI

SEQ ID NO: 541 - protein, 16 aa, Artificial Sequence
  Synthetic: VLCDR1 Ab51
RSSRSLLHSDGKTYVY

SEQ ID NO: 542 - protein, 7 aa, Artificial Sequence
  Synthetic: VLCDR2 Ab51
ELSNRFS

SEQ ID NO: 543 - protein, 9 aa, Artificial Sequence
  Synthetic: VLCDR3 Ab51
MQYIEAPLT

SEQ ID NO: 544 - protein, 124 aa, Artificial Sequence
  Synthetic: VH Ab51
EVQLLESGGGVVQPGRSLRLSCAASGFTFSSYAMHWVRQAPGKGLEWVAVISYDGSNKYYADSVKGRFTISRDNSKNTLSLQMNSLRVEDTAIYYCVRGAGRGFPYGPDGFDIWGQGTMVTVSS

SEQ ID NO: 545 - protein, 112 aa, Artificial Sequence; identical to SEQ ID NO: 395
  Synthetic: VL Ab51

SEQ ID NO: 546 - protein, 446 aa, Artificial Sequence
  Synthetic: HC Ab51
EVQLLESGGGVVQPGRSLRLSCAASGFTFSSYAMHWVRQAPGKGLEWVAVISYDGSNKYYADSVKGRFTISRDNSKNTLSLQMNSLRVEDTAIYYCVRGAGRGFPYGPDGFDIWGQGTMVTVSSKGPSVFPLAPSSRSTSESTAALGCLVKDYFPEPVTVSWNSGALTSGVHTFPAVLQSSGLYSLSSVVTVPSSNFGTQTYTCNVDHKPSNTKVDKTVERKCCVECPPCPAPPVAGPSVFLFPPKPKDTLMISRTPEVTCVVVDVSHEDPEVQFNWYVDGVEVHNAKTKPREEQFNSTFRVVSVLTVVHQDWLNGKEYKCKVSNKGLPAPIEKTISKTKGQPREPQVYTLPPSREEMTKNQVSLTCLVKGFYPSDIAVEWESNGQPENNYKTTPPMLDSDGSFFLYSKLTVDKSRWQQGNVFSCSVMHEALHNHYTQKSLSLSPG

SEQ ID NO: 547 - protein, 219 aa, Artificial Sequence; identical to SEQ ID NO: 397
  Synthetic: LC Ab51

SEQ ID NO: 548 - protein, 5 aa, Artificial Sequence
  Synthetic: VHCDR1 Ab52
SYAMH

SEQ ID NO: 549 - protein, 17 aa, Artificial Sequence
  Synthetic: VHCDR2 Ab52
VISYDGSNKYYADSVKG

SEQ ID NO: 550 - protein, 15 aa, Artificial Sequence
  Synthetic: VLCDR3 Ab52
GAGLGYPNGPDGFDI

SEQ ID NO: 551 - protein, 16 aa, Artificial Sequence
  Synthetic: VLCDR1 Ab52
RSSRSLLHSDGKTYVY

SEQ ID NO: 552 - protein, 7 aa, Artificial Sequence
  Synthetic: VLCDR2 Ab52
ELSNRFS

SEQ ID NO: 553 - protein, 9 aa, Artificial Sequence
  Synthetic: VLCDR3 Ab52
MQYIEAPLT

SEQ ID NO: 554 - protein, 124 aa, Artificial Sequence
  Synthetic: VH Ab52
EVQLLESGGGVVQPGRSLRLSCAASGFTFSSYAMHWVRQAPGKGLEWVAVISYDGSNKYYADSVKGRFTISRDNSKNTLSLQMNSLRVEDTAIYYCVRGAGLGYPNGPDGFDIWGQGTMVTVSS

SEQ ID NO: 555 - protein, 112 aa, Artificial Sequence; identical to SEQ ID NO: 395
  Synthetic: VL Ab52

SEQ ID NO: 556 - protein, 446 aa, Artificial Sequence
  Synthetic: HC Ab52
EVQLLESGGGVVQPGRSLRLSCAASGFTFSSYAMHWVRQAPGKGLEWVAVISYDGSNKYYADSVKGRFTISRDNSKNTLSLQMNSLRVEDTAIYYCVRGAGLGYPNGPDGFDIWGQGTMVTVSSKGPSVFPLAPSSRSTSESTAALGCLVKDYFPEPVTVSWNSGALTSGVHTFPAVLQSSGLYSLSSVVTVPSSNFGTQTYTCNVDHKPSNTKVDKTVERKCCVECPPCPAPPVAGPSVFLFPPKPKDTLMISRTPEVTCVVVDVSHEDPEVQFNWYVDGVEVHNAKTKPREEQFNSTFRVVSVLTVVHQDWLNGKEYKCKVSNKGLPAPIEKTISKTKGQPREPQVYTLPPSREEMTKNQVSLTCLVKGFYPSDIAVEWESNGQPENNYKTTPPMLDSDGSFFLYSKLTVDKSRWQQGNVFSCSVMHEALHNHYTQKSLSLSPG

SEQ ID NO: 557 - protein, 219 aa, Artificial Sequence; identical to SEQ ID NO: 397
  Synthetic: LC Ab52

SEQ ID NO: 558 - protein, 5 aa, Artificial Sequence
  Synthetic: VHCDR1 Ab53
SYAMH

SEQ ID NO: 559 - protein, 17 aa, Artificial Sequence
  Synthetic: VHCDR2 Ab53
VISYDGSNKYYADSVKG

SEQ ID NO: 560 - protein, 15 aa, Artificial Sequence
  Synthetic: VLCDR3 Ab53
GAGQGFPYGPDGFDI

SEQ ID NO: 561 - protein, 16 aa, Artificial Sequence
  Synthetic: VLCDR1 Ab53
RSSRSLLHSDGKTYVY

SEQ ID NO: 562 - protein, 7 aa, Artificial Sequence
  Synthetic: VLCDR2 Ab53
ELSNRFS

SEQ ID NO: 563 - protein, 9 aa, Artificial Sequence
  Synthetic: VLCDR3 Ab53
MQYIEAPLT

SEQ ID NO: 564 - protein, 124 aa, Artificial Sequence
  Synthetic: VH Ab53
EVQLLESGGGVVQPGRSLRLSCAASGFTFSSYAMHWVRQAPGKGLEWVAVISYDGSNKYYADSVKGRFTISRDNSKNTLSLQMNSLRVEDTAIYYCVRGAGQGFPYGPDGFDIWGQGTMVTVSS

SEQ ID NO: 565 - protein, 112 aa, Artificial Sequence; identical to SEQ ID NO: 395
  Synthetic: VL Ab53

SEQ ID NO: 566 - protein, 446 aa, Artificial Sequence
  Synthetic: HC Ab53
EVQLLESGGGVVQPGRSLRLSCAASGFTFSSYAMHWVRQAPGKGLEWVAVISYDGSNKYYADSVKGRFTISRDNSKNTLSLQMNSLRVEDTAIYYCVRGAGQGFPYGPDGFDIWGQGTMVTVSSKGPSVFPLAPSSRSTSESTAALGCLVKDYFPEPVTVSWNSGALTSGVHTFPAVLQSSGLYSLSSVVTVPSSNFGTQTYTCNVDHKPSNTKVDKTVERKCCVECPPCPAPPVAGPSVFLFPPKPKDTLMISRTPEVTCVVVDVSHEDPEVQFNWYVDGVEVHNAKTKPREEQFNSTFRVVSVLTVVHQDWLNGKEYKCKVSNKGLPAPIEKTISKTKGQPREPQVYTLPPSREEMTKNQVSLTCLVKGFYPSDIAVEWESNGQPENNYKTTPPMLDSDGSFFLYSKLTVDKSRWQQGNVFSCSVMHEALHNHYTQKSLSLSPG

SEQ ID NO: 567 - protein, 219 aa, Artificial Sequence; identical to SEQ ID NO: 397
  Synthetic: LC Ab53

SEQ ID NO: 568 - protein, 5 aa, Artificial Sequence
  Synthetic: VHCDR1 Ab54
SYAMH

SEQ ID NO: 569 - protein, 17 aa, Artificial Sequence
  Synthetic: VHCDR2 Ab54
VISYDGSNKYYADSVKG

SEQ ID NO: 570 - protein, 15 aa, Artificial Sequence
  Synthetic: VLCDR3 Ab54
GAGQGYPYGPDGFDI

SEQ ID NO: 571 - protein, 16 aa, Artificial Sequence
  Synthetic: VLCDR1 Ab54
TSSRSLLHSDGKTYVY

SEQ ID NO: 572 - protein, 7 aa, Artificial Sequence
  Synthetic: VLCDR2 Ab54
ELSNRFS

SEQ ID NO: 573 - protein, 9 aa, Artificial Sequence
  Synthetic: VLCDR3 Ab54
MQYIEAPLT

SEQ ID NO: 574 - protein, 124 aa, Artificial Sequence; identical to SEQ ID NO: 414
  Synthetic: VH Ab54

SEQ ID NO: 575 - protein, 112 aa, Artificial Sequence; identical to SEQ ID NO: 184
  Synthetic: VL Ab54

SEQ ID NO: 576 - protein, 446 aa, Artificial Sequence; identical to SEQ ID NO: 416
  Synthetic: HC Ab54

SEQ ID NO: 577 - protein, 219 aa, Artificial Sequence; identical to SEQ ID NO: 187
  Synthetic: LC Ab54

SEQ ID NO: 578 - protein, 5 aa, Artificial Sequence
  Synthetic: VHCDR1 Ab55
SYAMH

SEQ ID NO: 579 - protein, 17 aa, Artificial Sequence
  Synthetic: VHCDR2 Ab55
VISYDGSNKYYADSVKG

SEQ ID NO: 580 - protein, 15 aa, Artificial Sequence
  Synthetic: VLCDR3 Ab55
GAGTGFTYGPDGFDI

SEQ ID NO: 581 - protein, 16 aa, Artificial Sequence
  Synthetic: VLCDR1 Ab55
TSSRSLLHSDGKTYVY

SEQ ID NO: 582 - protein, 7 aa, Artificial Sequence
  Synthetic: VLCDR2 Ab55
ELSNRFS

SEQ ID NO: 583 - protein, 9 aa, Artificial Sequence
  Synthetic: VLCDR3 Ab55
MQYIEAPLT

SEQ ID NO: 584 - protein, 124 aa, Artificial Sequence; identical to SEQ ID NO: 424
  Synthetic: VH Ab55

SEQ ID NO: 585 - protein, 112 aa, Artificial Sequence; identical to SEQ ID NO: 184
  Synthetic: VL Ab55

SEQ ID NO: 586 - protein, 446 aa, Artificial Sequence; identical to SEQ ID NO: 426
  Synthetic: HC Ab55

SEQ ID NO: 587 - protein, 219 aa, Artificial Sequence; identical to SEQ ID NO: 187
  Synthetic: LC Ab55

SEQ ID NO: 588 - protein, 5 aa, Artificial Sequence
  Synthetic: VHCDR1 Ab56
SYAMH

SEQ ID NO: 589 - protein, 17 aa, Artificial Sequence
  Synthetic: VHCDR2 Ab56
VISYDGSNKYYADSVKG

SEQ ID NO: 590 - protein, 15 aa, Artificial Sequence
  Synthetic: VLCDR3 Ab56
GAGMGLTYGPDGFDI

SEQ ID NO: 591 - protein, 16 aa, Artificial Sequence
  Synthetic: VLCDR1 Ab56
TSSRSLLHSDGKTYVY

SEQ ID NO: 592 - protein, 7 aa, Artificial Sequence
  Synthetic: VLCDR2 Ab56
ELSNRFS

SEQ ID NO: 593 - protein, 9 aa, Artificial Sequence
  Synthetic: VLCDR3 Ab56
MQYIEAPLT

SEQ ID NO: 594 - protein, 124 aa, Artificial Sequence; identical to SEQ ID NO: 434
  Synthetic: VH Ab56

SEQ ID NO: 595 - protein, 112 aa, Artificial Sequence; identical to SEQ ID NO: 184
  Synthetic: VL Ab56

SEQ ID NO: 596 - protein, 446 aa, Artificial Sequence; identical to SEQ ID NO: 436
  Synthetic: HC Ab56

SEQ ID NO: 597 - protein, 219 aa, Artificial Sequence; identical to SEQ ID NO: 187
  Synthetic: LC Ab56

SEQ ID NO: 598 - protein, 5 aa, Artificial Sequence
  Synthetic: VHCDR1 Ab57
SYAMH

SEQ ID NO: 599 - protein, 17 aa, Artificial Sequence
  Synthetic: VHCDR2 Ab57
VISYDGSNKYYADSVKG

SEQ ID NO: 600 - protein, 15 aa, Artificial Sequence
  Synthetic: VLCDR3 Ab57
GAGLGFPYGPDGFDI

SEQ ID NO: 601 - protein, 16 aa, Artificial Sequence
  Synthetic: VLCDR1 Ab57
TSSRSLLHSDGKTYVY

SEQ ID NO: 602 - protein, 7 aa, Artificial Sequence
  Synthetic: VLCDR2 Ab57
ELSNRFS

SEQ ID NO: 603 - protein, 9 aa, Artificial Sequence
  Synthetic: VLCDR3 Ab57
MQYIEAPLT

SEQ ID NO: 604 - protein, 124 aa, Artificial Sequence; identical to SEQ ID NO: 444
  Synthetic: VH Ab57

SEQ ID NO: 605 - protein, 112 aa, Artificial Sequence; identical to SEQ ID NO: 184
  Synthetic: VL Ab57

SEQ ID NO: 606 - protein, 446 aa, Artificial Sequence; identical to SEQ ID NO: 446
  Synthetic: HC Ab57

SEQ ID NO: 607 - protein, 219 aa, Artificial Sequence; identical to SEQ ID NO: 187
  Synthetic: LC Ab57

SEQ ID NO: 608 - protein, 5 aa, Artificial Sequence
  Synthetic: VHCDR1 Ab58
SYAMH

SEQ ID NO: 609 - protein, 17 aa, Artificial Sequence
  Synthetic: VHCDR2 Ab58
VISYDGSNKYYADSVKG

SEQ ID NO: 610 - protein, 15 aa, Artificial Sequence
  Synthetic: VLCDR3 Ab58
GAGLGWAYGPDGFDI

SEQ ID NO: 611 - protein, 16 aa, Artificial Sequence
  Synthetic: VLCDR1 Ab58
TSSRSLLHSDGKTYVY

SEQ ID NO: 612 - protein, 7 aa, Artificial Sequence
  Synthetic: VLCDR2 Ab58
ELSNRFS

SEQ ID NO: 613 - protein, 9 aa, Artificial Sequence
  Synthetic: VLCDR3 Ab58
MQYIEAPLT

SEQ ID NO: 614 - protein, 124 aa, Artificial Sequence; identical to SEQ ID NO: 454
  Synthetic: VH Ab58

SEQ ID NO: 615 - protein, 112 aa, Artificial Sequence; identical to SEQ ID NO: 184
  Synthetic: VL Ab58

SEQ ID NO: 616 - protein, 446 aa, Artificial Sequence; identical to SEQ ID NO: 456
  Synthetic: HC Ab58

SEQ ID NO: 617 - protein, 219 aa, Artificial Sequence; identical to SEQ ID NO: 187
  Synthetic: LC Ab58

SEQ ID NO: 618 - protein, 5 aa, Artificial Sequence
  Synthetic: VHCDR1 Ab59
SYAMH

SEQ ID NO: 619 - protein, 17 aa, Artificial Sequence
  Synthetic: VHCDR2 Ab59
VISYDGSNKYYADSVKG

SEQ ID NO: 620 - protein, 15 aa, Artificial Sequence
  Synthetic: VLCDR3 Ab59
GAGRGYPYGPDGFDI

SEQ ID NO: 621 - protein, 16 aa, Artificial Sequence
  Synthetic: VLCDR1 Ab59
TSSRSLLHSDGKTYVY

SEQ ID NO: 622 - protein, 7 aa, Artificial Sequence
  Synthetic: VLCDR2 Ab59
ELSNRFS

SEQ ID NO: 623 - protein, 9 aa, Artificial Sequence
  Synthetic: VLCDR3 Ab59
MQYIEAPLT

SEQ ID NO: 624 - protein, 124 aa, Artificial Sequence; identical to SEQ ID NO: 464
  Synthetic: VH Ab59

SEQ ID NO: 625 - protein, 112 aa, Artificial Sequence; identical to SEQ ID NO: 184
  Synthetic: VL Ab59

SEQ ID NO: 626 - protein, 446 aa, Artificial Sequence; identical to SEQ ID NO: 466
  Synthetic: HC Ab59

SEQ ID NO: 627 - protein, 219 aa, Artificial Sequence; identical to SEQ ID NO: 187
  Synthetic: LC Ab59

SEQ ID NO: 628 - protein, 5 aa, Artificial Sequence
  Synthetic: VHCDR1 Ab60
GYAMH

SEQ ID NO: 629 - protein, 17 aa, Artificial Sequence
  Synthetic: VHCDR2 Ab60
VISYDGSNKYYADSVKG

SEQ ID NO: 630 - protein, 15 aa, Artificial Sequence
  Synthetic: VLCDR3 Ab60
GAGRGLTYGPDGFDI

SEQ ID NO: 631 - protein, 16 aa, Artificial Sequence
  Synthetic: VLCDR1 Ab60
TSSRSLLHSDGKTYVY

SEQ ID NO: 632 - protein, 7 aa, Artificial Sequence
  Synthetic: VLCDR2 Ab60
ELSNRFS

SEQ ID NO: 633 - protein, 9 aa, Artificial Sequence
  Synthetic: VLCDR3 Ab60
MQYIEAPLT

SEQ ID NO: 634 - protein, 124 aa, Artificial Sequence; identical to SEQ ID NO: 474
  Synthetic: VH Ab60

SEQ ID NO: 635 - protein, 112 aa, Artificial Sequence; identical to SEQ ID NO: 184
  Synthetic: VL Ab60

SEQ ID NO: 636 - protein, 446 aa, Artificial Sequence; identical to SEQ ID NO: 476
  Synthetic: HC Ab60

SEQ ID NO: 637 - protein, 219 aa, Artificial Sequence; identical to SEQ ID NO: 187
  Synthetic: LC Ab60

SEQ ID NO: 638 - protein, 5 aa, Artificial Sequence
  Synthetic: VHCDR1 Ab61
SYAMH

SEQ ID NO: 639 - protein, 17 aa, Artificial Sequence
  Synthetic: VHCDR2 Ab61
VISYDGSNKYYADSVKG

SEQ ID NO: 640 - protein, 15 aa, Artificial Sequence
  Synthetic: VLCDR3 Ab61
GAGLGLTYGPDGFDI

SEQ ID NO: 641 - protein, 16 aa, Artificial Sequence
  Synthetic: VLCDR1 Ab61
TSSRSLLHSDGKTYVY

SEQ ID NO: 642 - protein, 7 aa, Artificial Sequence
  Synthetic: VLCDR2 Ab61
ELSNRFS

SEQ ID NO: 643 - protein, 9 aa, Artificial Sequence
  Synthetic: VLCDR3 Ab61
MQYIEAPLT

SEQ ID NO: 644 - protein, 124 aa, Artificial Sequence; identical to SEQ ID NO: 484
  Synthetic: VH Ab61

SEQ ID NO: 645 - protein, 112 aa, Artificial Sequence; identical to SEQ ID NO: 184
  Synthetic: VL Ab61

SEQ ID NO: 646 - protein, 446 aa, Artificial Sequence; identical to SEQ ID NO: 486
  Synthetic: HC Ab61

SEQ ID NO: 647 - protein, 219 aa, Artificial Sequence; identical to SEQ ID NO: 187
  Synthetic: LC Ab61

SEQ ID NO: 648 - protein, 5 aa, Artificial Sequence
  Synthetic: VHCDR1 Ab62
SYAMH

SEQ ID NO: 649 - protein, 17 aa, Artificial Sequence
  Synthetic: VHCDR2 Ab62
VISYDGSNKYYADSVKG

SEQ ID NO: 650 - protein, 15 aa, Artificial Sequence
  Synthetic: VLCDR3 Ab62
GAGLGYPYGPDGFDI

SEQ ID NO: 651 - protein, 16 aa, Artificial Sequence
  Synthetic: VLCDR1 Ab62
TSSRSLLHSDGKTYVY

SEQ ID NO: 652 - protein, 7 aa, Artificial Sequence
  Synthetic: VLCDR2 Ab62
ELSNRFS

SEQ ID NO: 653 - protein, 9 aa, Artificial Sequence
  Synthetic: VLCDR3 Ab62
MQYIEAPLT

SEQ ID NO: 654 - protein, 124 aa, Artificial Sequence; identical to SEQ ID NO: 494
  Synthetic: VH Ab62

SEQ ID NO: 655 - protein, 112 aa, Artificial Sequence; identical to SEQ ID NO: 184
  Synthetic: VL Ab62

SEQ ID NO: 656 - protein, 446 aa, Artificial Sequence; identical to SEQ ID NO: 496
  Synthetic: HC Ab62

SEQ ID NO: 657 - protein, 219 aa, Artificial Sequence; identical to SEQ ID NO: 187
  Synthetic: LC Ab62

SEQ ID NO: 658 - protein, 5 aa, Artificial Sequence
  Synthetic: VHCDR1 Ab63
SYAMH

SEQ ID NO: 659 - protein, 17 aa, Artificial Sequence
  Synthetic: VHCDR2 Ab63
VISYDGSNKYYADSVKG

SEQ ID NO: 660 - protein, 15 aa, Artificial Sequence
  Synthetic: VLCDR3 Ab63
GAGRGYPHGPDGFDI

SEQ ID NO: 661 - protein, 16 aa, Artificial Sequence
  Synthetic: VLCDR1 Ab63
TSSRSLLHSDGKTYVY

SEQ ID NO: 662 - protein, 7 aa, Artificial Sequence
  Synthetic: VLCDR2 Ab63
ELSNRFS

SEQ ID NO: 663 - protein, 9 aa, Artificial Sequence
  Synthetic: VLCDR3 Ab63
MQYIEAPLT

SEQ ID NO: 664 - protein, 124 aa, Artificial Sequence; identical to SEQ ID NO: 504
  Synthetic: VH Ab63

SEQ ID NO: 665 - protein, 112 aa, Artificial Sequence; identical to SEQ ID NO: 184
  Synthetic: VL Ab63

SEQ ID NO: 666 - protein, 446 aa, Artificial Sequence; identical to SEQ ID NO: 506
  Synthetic: HC Ab63

SEQ ID NO: 667 - protein, 219 aa, Artificial Sequence; identical to SEQ ID NO: 187
  Synthetic: LC Ab63

SEQ ID NO: 668 - protein, 5 aa, Artificial Sequence
  Synthetic: VHCDR1 Ab64
SYAMH

SEQ ID NO: 669 - protein, 17 aa, Artificial Sequence
  Synthetic: VHCDR2 Ab64
VISYDGSNKYYADSVKG

SEQ ID NO: 670 - protein, 15 aa, Artificial Sequence
  Synthetic: VLCDR3 Ab64
GAGIGYPHGPDGFDI

SEQ ID NO: 671 - protein, 16 aa, Artificial Sequence
  Synthetic: VLCDR1 Ab64
TSSRSLLHSDGKTYVY

SEQ ID NO: 672 - protein, 7 aa, Artificial Sequence
  Synthetic: VLCDR2 Ab64
ELSNRFS

SEQ ID NO: 673 - protein, 9 aa, Artificial Sequence
  Synthetic: VLCDR3 Ab64
MQYIEAPLT

SEQ ID NO: 674 - protein, 124 aa, Artificial Sequence; identical to SEQ ID NO: 514
  Synthetic: VH Ab64

SEQ ID NO: 675 - protein, 112 aa, Artificial Sequence; identical to SEQ ID NO: 184
  Synthetic: VL Ab64

SEQ ID NO: 676 - protein, 446 aa, Artificial Sequence; identical to SEQ ID NO: 516
  Synthetic: HC Ab64

SEQ ID NO: 677 - protein, 219 aa, Artificial Sequence; identical to SEQ ID NO: 187
  Synthetic: LC Ab64

SEQ ID NO: 678 - protein, 5 aa, Artificial Sequence
  Synthetic: VHCDR1 Ab65
SYAMH

SEQ ID NO: 679 - protein, 17 aa, Artificial Sequence
  Synthetic: VHCDR2 Ab65
VISYDGSNKYYADSVKG

SEQ ID NO: 680 - protein, 15 aa, Artificial Sequence
  Synthetic: VLCDR3 Ab65
GAGRGYPYGPDGFDI

SEQ ID NO: 681 - protein, 16 aa, Artificial Sequence
  Synthetic: VLCDR1 Ab65
TSSRSLLHSDGKTYVY

SEQ ID NO: 682 - protein, 7 aa, Artificial Sequence
  Synthetic: VLCDR2 Ab65
ELSNRFS

SEQ ID NO: 683 - protein, 9 aa, Artificial Sequence
  Synthetic: VLCDR3 Ab65
MQYIEAPLT

SEQ ID NO: 684 - protein, 124 aa, Artificial Sequence; identical to SEQ ID NO: 464
  Synthetic: VH Ab65

SEQ ID NO: 685 - protein, 112 aa, Artificial Sequence; identical to SEQ ID NO: 184
  Synthetic: VL Ab65

SEQ ID NO: 686 - protein, 446 aa, Artificial Sequence; identical to SEQ ID NO: 466
  Synthetic: HC Ab65

SEQ ID NO: 687 - protein, 219 aa, Artificial Sequence; identical to SEQ ID NO: 187
  Synthetic: LC Ab65

SEQ ID NO: 688 - protein, 5 aa, Artificial Sequence
  Synthetic: VHCDR1 Ab66
SYAMH

SEQ ID NO: 689 - protein, 17 aa, Artificial Sequence
  Synthetic: VHCDR2 Ab66
VISYDGSNKYYADSVKG

SEQ ID NO: 690 - protein, 15 aa, Artificial Sequence
  Synthetic: VLCDR3 Ab66
GAGLGFPFGPDGFDI

SEQ ID NO: 691 - protein, 16 aa, Artificial Sequence
  Synthetic: VLCDR1 Ab66
TSSRSLLHSDGKTYVY

SEQ ID NO: 692 - protein, 7 aa, Artificial Sequence
  Synthetic: VLCDR2 Ab66
ELSNRFS

SEQ ID NO: 693 - protein, 9 aa, Artificial Sequence
  Synthetic: VLCDR3 Ab66
MQYIEAPLT

SEQ ID NO: 694 - protein, 124 aa, Artificial Sequence; identical to SEQ ID NO: 534
  Synthetic: VH Ab66

SEQ ID NO: 695 - protein, 112 aa, Artificial Sequence; identical to SEQ ID NO: 184
  Synthetic: VL Ab66

SEQ ID NO: 696 - protein, 446 aa, Artificial Sequence; identical to SEQ ID NO: 536
  Synthetic: HC Ab66

SEQ ID NO: 697 - protein, 219 aa, Artificial Sequence; identical to SEQ ID NO: 187
  Synthetic: LC Ab66

SEQ ID NO: 698 - protein, 5 aa, Artificial Sequence
  Synthetic: VHCDR1 Ab67
SYAMH

SEQ ID NO: 699 - protein, 17 aa, Artificial Sequence
  Synthetic: VHCDR2 Ab67
VISYDGSNKYYADSVKG

SEQ ID NO: 700 - protein, 15 aa, Artificial Sequence
  Synthetic: VLCDR3 Ab67
GAGRGFPYGPDGFDI

SEQ ID NO: 701 - protein, 16 aa, Artificial Sequence
  Synthetic: VLCDR1 Ab67
TSSRSLLHSDGKTYVY

SEQ ID NO: 702 - protein, 7 aa, Artificial Sequence
  Synthetic: VLCDR2 Ab67
ELSNRFS

SEQ ID NO: 703 - protein, 9 aa, Artificial Sequence
  Synthetic: VLCDR3 Ab67
MQYIEAPLT

SEQ ID NO: 704 - protein, 124 aa, Artificial Sequence; identical to SEQ ID NO: 544
  Synthetic: VH Ab67

SEQ ID NO: 705 - protein, 112 aa, Artificial Sequence; identical to SEQ ID NO: 184
  Synthetic: VL Ab67

SEQ ID NO: 706 - protein, 446 aa, Artificial Sequence; identical to SEQ ID NO: 546
  Synthetic: HC Ab67

SEQ ID NO: 707 - protein, 219 aa, Artificial Sequence; identical to SEQ ID NO: 187
  Synthetic: LC Ab67

SEQ ID NO: 708 - protein, 5 aa, Artificial Sequence
  Synthetic: VHCDR1 Ab68
SYAMH

SEQ ID NO: 709 - protein, 17 aa, Artificial Sequence
  Synthetic: VHCDR2 Ab68
VISYDGSNKYYADSVKG

SEQ ID NO: 710 - protein, 15 aa, Artificial Sequence
  Synthetic: VLCDR3 Ab68
GAGLGYPNGPDGFDI

SEQ ID NO: 711 - protein, 16 aa, Artificial Sequence
  Synthetic: VLCDR1 Ab68
TSSRSLLHSDGKTYVY

SEQ ID NO: 712 - protein, 7 aa, Artificial Sequence
  Synthetic: VLCDR2 Ab68
ELSNRFS

SEQ ID NO: 713 - protein, 9 aa, Artificial Sequence
  Synthetic: VLCDR3 Ab68
MQYIEAPLT

SEQ ID NO: 714 - protein, 124 aa, Artificial Sequence; identical to SEQ ID NO: 554
  Synthetic: VH Ab68

SEQ ID NO: 715 - protein, 112 aa, Artificial Sequence; identical to SEQ ID NO: 184
  Synthetic: VL Ab68

SEQ ID NO: 716 - protein, 446 aa, Artificial Sequence; identical to SEQ ID NO: 556
  Synthetic: HC Ab68

SEQ ID NO: 717 - protein, 219 aa, Artificial Sequence; identical to SEQ ID NO: 187
  Synthetic: LC Ab68

SEQ ID NO: 718 - protein, 5 aa, Artificial Sequence
  Synthetic: VHCDR1 Ab69
SYAMH

SEQ ID NO: 719 - protein, 17 aa, Artificial Sequence
  Synthetic: VHCDR2 Ab69
VISYDGSNKYYADSVKG

SEQ ID NO: 720 - protein, 15 aa, Artificial Sequence
  Synthetic: VLCDR3 Ab69
GAGQGFPYGPDGFDI

SEQ ID NO: 721 - protein, 16 aa, Artificial Sequence
  Synthetic: VLCDR1 Ab69
TSSRSLLHSDGKTYVY

SEQ ID NO: 722 - protein, 7 aa, Artificial Sequence
  Synthetic: VLCDR2 Ab69
ELSNRFS

SEQ ID NO: 723 - protein, 9 aa, Artificial Sequence
  Synthetic: VLCDR3 Ab69
MQYIEAPLT

SEQ ID NO: 724 - protein, 124 aa, Artificial Sequence; identical to SEQ ID NO: 564
  Synthetic: VH Ab69

SEQ ID NO: 725 - protein, 112 aa, Artificial Sequence; identical to SEQ ID NO: 184
  Synthetic: VL Ab69

SEQ ID NO: 726 - protein, 446 aa, Artificial Sequence; identical to SEQ ID NO: 566
  Synthetic: HC Ab69

SEQ ID NO: 727 - protein, 219 aa, Artificial Sequence; identical to SEQ ID NO: 187
  Synthetic: LC Ab69

SEQ ID NO: 728 - protein, 5 aa, Artificial Sequence
  Synthetic: VHCDR1 Ab70
SYAMH

SEQ ID NO: 729 - protein, 17 aa, Artificial Sequence
  Synthetic: VHCDR2 Ab70
VISYDGSNKYYADSVKG

SEQ ID NO: 730 - protein, 15 aa, Artificial Sequence
  Synthetic: VLCDR3 Ab70
GAGQGYPYGPDGFDI

SEQ ID NO: 731 - protein, 16 aa, Artificial Sequence
  Synthetic: VLCDR1 Ab70
KSSRSLLHSDGKTYVY

SEQ ID NO: 732 - protein, 7 aa, Artificial Sequence
  Synthetic: VLCDR2 Ab70
ELSNRFS

SEQ ID NO: 733 - protein, 9 aa, Artificial Sequence
  Synthetic: VLCDR3 Ab70
MQYIEAPLT

SEQ ID NO: 734 - protein, 124 aa, Artificial Sequence; identical to SEQ ID NO: 414
  Synthetic: VH Ab70

SEQ ID NO: 735 - protein, 112 aa, Artificial Sequence; identical to SEQ ID NO: 195
  Synthetic: VL Ab70

SEQ ID NO: 736 - protein, 446 aa, Artificial Sequence; identical to SEQ ID NO: 416
  Synthetic: HC Ab70

SEQ ID NO: 737 - protein, 219 aa, Artificial Sequence; identical to SEQ ID NO: 197
  Synthetic: LC Ab70

SEQ ID NO: 738 - protein, 5 aa, Artificial Sequence
  Synthetic: VHCDR1 Ab71
SYAMH

SEQ ID NO: 739 - protein, 17 aa, Artificial Sequence
  Synthetic: VHCDR2 Ab71
VISYDGSNKYYADSVKG

SEQ ID NO: 740 - protein, 15 aa, Artificial Sequence
  Synthetic: VLCDR3 Ab71
GAGTGFTYGPDGFDI

SEQ ID NO: 741 - protein, 16 aa, Artificial Sequence
  Synthetic: VLCDR1 Ab71
KSSRSLLHSDGKTYVY

SEQ ID NO: 742 - protein, 7 aa, Artificial Sequence
  Synthetic: VLCDR2 Ab71
ELSNRFS

SEQ ID NO: 743 - protein, 9 aa, Artificial Sequence
  Synthetic: VLCDR3 Ab71
MQYIEAPLT

SEQ ID NO: 744 - protein, 124 aa, Artificial Sequence; identical to SEQ ID NO: 424
  Synthetic: VH Ab71

SEQ ID NO: 745 - protein, 112 aa, Artificial Sequence; identical to SEQ ID NO: 195
  Synthetic: VL Ab71

SEQ ID NO: 746 - protein, 446 aa, Artificial Sequence; identical to SEQ ID NO: 426
  Synthetic: HC Ab71

SEQ ID NO: 747 - protein, 219 aa, Artificial Sequence; identical to SEQ ID NO: 197
  Synthetic: LC Ab71

SEQ ID NO: 748 - protein, 5 aa, Artificial Sequence
  Synthetic: VHCDR1 Ab72
SYAMH

SEQ ID NO: 749 - protein, 17 aa, Artificial Sequence
  Synthetic: VHCDR2 Ab72
VISYDGSNKYYADSVKG

SEQ ID NO: 750 - protein, 15 aa, Artificial Sequence
  Synthetic: VLCDR3 Ab72
GAGMGLTYGPDGFDI

SEQ ID NO: 751 - protein, 16 aa, Artificial Sequence
  Synthetic: VLCDR1 Ab72
KSSRSLLHSDGKTYVY

SEQ ID NO: 752 - protein, 7 aa, Artificial Sequence
  Synthetic: VLCDR2 Ab72
ELSNRFS

SEQ ID NO: 753 - protein, 9 aa, Artificial Sequence
  Synthetic: VLCDR3 Ab72
MQYIEAPLT

SEQ ID NO: 754 - protein, 124 aa, Artificial Sequence; identical to SEQ ID NO: 434
  Synthetic: VH Ab72

SEQ ID NO: 755 - protein, 112 aa, Artificial Sequence; identical to SEQ ID NO: 195
  Synthetic: VL Ab72

SEQ ID NO: 756 - protein, 446 aa, Artificial Sequence; identical to SEQ ID NO: 436
  Synthetic: HC Ab72

SEQ ID NO: 757 - protein, 219 aa, Artificial Sequence; identical to SEQ ID NO: 197
  Synthetic: LC Ab72

SEQ ID NO: 758 - protein, 5 aa, Artificial Sequence
  Synthetic: VHCDR1 Ab73
SYAMH

SEQ ID NO: 759 - protein, 17 aa, Artificial Sequence
  Synthetic: VHCDR2 Ab73
VISYDGSNKYYADSVKG

SEQ ID NO: 760 - protein, 15 aa, Artificial Sequence
  Synthetic: VLCDR3 Ab73
GAGLGFPYGPDGFDI

SEQ ID NO: 761 - protein, 16 aa, Artificial Sequence
  Synthetic: VLCDR1 Ab73
KSSRSLLHSDGKTYVY

SEQ ID NO: 762 - protein, 7 aa, Artificial Sequence
  Synthetic: VLCDR2 Ab73
ELSNRFS

SEQ ID NO: 763 - protein, 9 aa, Artificial Sequence
  Synthetic: VLCDR3 Ab73
MQYIEAPLT

SEQ ID NO: 764 - protein, 124 aa, Artificial Sequence; identical to SEQ ID NO: 444
  Synthetic: VH Ab73

SEQ ID NO: 765 - protein, 112 aa, Artificial Sequence; identical to SEQ ID NO: 195
  Synthetic: VL Ab73

SEQ ID NO: 766 - protein, 446 aa, Artificial Sequence; identical to SEQ ID NO: 446
  Synthetic: HC Ab73

SEQ ID NO: 767 - protein, 219 aa, Artificial Sequence; identical to SEQ ID NO: 197
  Synthetic: LC Ab73

SEQ ID NO: 768 - protein, 5 aa, Artificial Sequence
  Synthetic: VHCDR1 Ab74
SYAMH

SEQ ID NO: 769 - protein, 17 aa, Artificial Sequence
  Synthetic: VHCDR2 Ab74
VISYDGSNKYYADSVKG

SEQ ID NO: 770 - protein, 15 aa, Artificial Sequence
  Synthetic: VLCDR3 Ab74
GAGLGWAYGPDGFDI

SEQ ID NO: 771 - protein, 16 aa, Artificial Sequence
  Synthetic: VLCDR1 Ab74
KSSRSLLHSDGKTYVY

SEQ ID NO: 772 - protein, 7 aa, Artificial Sequence
  Synthetic: VLCDR2 Ab74
ELSNRFS

SEQ ID NO: 773 - protein, 9 aa, Artificial Sequence
  Synthetic: VLCDR3 Ab74
MQYIEAPLT

SEQ ID NO: 774 - protein, 124 aa, Artificial Sequence; identical to SEQ ID NO: 454
  Synthetic: VH Ab74

SEQ ID NO: 775 - protein, 112 aa, Artificial Sequence; identical to SEQ ID NO: 195
  Synthetic: VL Ab74

SEQ ID NO: 776 - protein, 446 aa, Artificial Sequence; identical to SEQ ID NO: 456
  Synthetic: HC Ab74

SEQ ID NO: 777 - protein, 219 aa, Artificial Sequence; identical to SEQ ID NO: 197
  Synthetic: LC Ab74

SEQ ID NO: 778 - protein, 5 aa, Artificial Sequence
  Synthetic: VHCDR1 Ab75
SYAMH

SEQ ID NO: 779 - protein, 17 aa, Artificial Sequence
  Synthetic: VHCDR2 Ab75
VISYDGSNKYYADSVKG

SEQ ID NO: 780 - protein, 15 aa, Artificial Sequence
  Synthetic: VLCDR3 Ab75
GAGRGYPYGPDGFDI

SEQ ID NO: 781 - protein, 16 aa, Artificial Sequence
  Synthetic: VLCDR1 Ab75
KSSRSLLHSDGKTYVY

SEQ ID NO: 782 - protein, 7 aa, Artificial Sequence
  Synthetic: VLCDR2 Ab75
ELSNRFS

SEQ ID NO: 783 - protein, 9 aa, Artificial Sequence
  Synthetic: VLCDR3 Ab75
MQYIEAPLT

SEQ ID NO: 784 - protein, 124 aa, Artificial Sequence; identical to SEQ ID NO: 464
  Synthetic: VH Ab75

SEQ ID NO: 785 - protein, 112 aa, Artificial Sequence; identical to SEQ ID NO: 195
  Synthetic: VL Ab75

SEQ ID NO: 786 - protein, 446 aa, Artificial Sequence; identical to SEQ ID NO: 466
  Synthetic: HC Ab75

SEQ ID NO: 787 - protein, 219 aa, Artificial Sequence; identical to SEQ ID NO: 197
  Synthetic: LC Ab75

SEQ ID NO: 788 - protein, 5 aa, Artificial Sequence
  Synthetic: VHCDR1 Ab76
GYAMH

SEQ ID NO: 789 - protein, 17 aa, Artificial Sequence
  Synthetic: VHCDR2 Ab76
VISYDGSNKYYADSVKG

SEQ ID NO: 790 - protein, 15 aa, Artificial Sequence
  Synthetic: VLCDR3 Ab76
GAGRGLTYGPDGFDI

SEQ ID NO: 791 - protein, 16 aa, Artificial Sequence
  Synthetic: VLCDR1 Ab76
KSSRSLLHSDGKTYVY

SEQ ID NO: 792 - protein, 7 aa, Artificial Sequence
  Synthetic: VLCDR2 Ab76
ELSNRFS

SEQ ID NO: 793 - protein, 9 aa, Artificial Sequence
  Synthetic: VLCDR3 Ab76
MQYIEAPLT

SEQ ID NO: 794 - protein, 124 aa, Artificial Sequence; identical to SEQ ID NO: 474
  Synthetic: VH Ab76

SEQ ID NO: 795 - protein, 112 aa, Artificial Sequence; identical to SEQ ID NO: 195
  Synthetic: VL Ab76

SEQ ID NO: 796 - protein, 446 aa, Artificial Sequence; identical to SEQ ID NO: 476
  Synthetic: HC Ab76

SEQ ID NO: 797 - protein, 219 aa, Artificial Sequence; identical to SEQ ID NO: 197
  Synthetic: LC Ab76

SEQ ID NO: 798 - protein, 5 aa, Artificial Sequence
  Synthetic: VHCDR1 Ab77
SYAMH

SEQ ID NO: 799 - protein, 17 aa, Artificial Sequence
  Synthetic: VHCDR2 Ab77
VISYDGSNKYYADSVKG

SEQ ID NO: 800 - protein, 15 aa, Artificial Sequence
  Synthetic: VLCDR3 Ab77
GAGLGLTYGPDGFDI

SEQ ID NO: 801 - protein, 16 aa, Artificial Sequence
  Synthetic: VLCDR1 Ab77
KSSRSLLHSDGKTYVY

SEQ ID NO: 802 - protein, 7 aa, Artificial Sequence
  Synthetic: VLCDR2 Ab77
ELSNRFS

SEQ ID NO: 803 - protein, 9 aa, Artificial Sequence
  Synthetic: VLCDR3 Ab77
MQYIEAPLT

SEQ ID NO: 804 - protein, 124 aa, Artificial Sequence; identical to SEQ ID NO: 484
  Synthetic: VH Ab77

SEQ ID NO: 805 - protein, 112 aa, Artificial Sequence; identical to SEQ ID NO: 195
  Synthetic: VL Ab77

SEQ ID NO: 806 - protein, 446 aa, Artificial Sequence; identical to SEQ ID NO: 486
  Synthetic: HC Ab77

SEQ ID NO: 807 - protein, 219 aa, Artificial Sequence; identical to SEQ ID NO: 197
  Synthetic: LC Ab77

SEQ ID NO: 808 - protein, 5 aa, Artificial Sequence
  Synthetic: VHCDR1 Ab78
SYAMH

SEQ ID NO: 809 - protein, 17 aa, Artificial Sequence
  Synthetic: VHCDR2 Ab78
VISYDGSNKYYADSVKG

SEQ ID NO: 810 - protein, 15 aa, Artificial Sequence
  Synthetic: VLCDR3 Ab78
GAGLGYPYGPDGFDI

SEQ ID NO: 811 - protein, 16 aa, Artificial Sequence
  Synthetic: VLCDR1 Ab78
KSSRSLLHSDGKTYVY

SEQ ID NO: 812 - protein, 7 aa, Artificial Sequence
  Synthetic: VLCDR2 Ab78
ELSNRFS

SEQ ID NO: 813 - protein, 9 aa, Artificial Sequence
  Synthetic: VLCDR3 Ab78
MQYIEAPLT

SEQ ID NO: 814 - protein, 124 aa, Artificial Sequence; identical to SEQ ID NO: 494
  Synthetic: VH Ab78

SEQ ID NO: 815 - protein, 112 aa, Artificial Sequence; identical to SEQ ID NO: 195
  Synthetic: VL Ab78

SEQ ID NO: 816 - protein, 446 aa, Artificial Sequence; identical to SEQ ID NO: 496
  Synthetic: HC Ab78

SEQ ID NO: 817 - protein, 219 aa, Artificial Sequence; identical to SEQ ID NO: 197
  Synthetic: LC Ab78

SEQ ID NO: 818 - protein, 5 aa, Artificial Sequence
  Synthetic: VHCDR1 Ab79
SYAMH

SEQ ID NO: 819 - protein, 17 aa, Artificial Sequence
  Synthetic: VHCDR2 Ab79
VISYDGSNKYYADSVKG

SEQ ID NO: 820 - protein, 15 aa, Artificial Sequence
  Synthetic: VLCDR3 Ab79
GAGRGYPHGPDGFDI

SEQ ID NO: 821 - protein, 16 aa, Artificial Sequence
  Synthetic: VLCDR1 Ab79
KSSRSLLHSDGKTYVY

SEQ ID NO: 822 - protein, 7 aa, Artificial Sequence
  Synthetic: VLCDR2 Ab79
ELSNRFS

SEQ ID NO: 823 - protein, 9 aa, Artificial Sequence
  Synthetic: VLCDR3 Ab79
MQYIEAPLT

SEQ ID NO: 824 - protein, 124 aa, Artificial Sequence; identical to SEQ ID NO: 504
  Synthetic: VH Ab79

SEQ ID NO: 825 - protein, 112 aa, Artificial Sequence; identical to SEQ ID NO: 195
  Synthetic: VL Ab79

SEQ ID NO: 826 - protein, 446 aa, Artificial Sequence; identical to SEQ ID NO: 506
  Synthetic: HC Ab79

SEQ ID NO: 827 - protein, 219 aa, Artificial Sequence; identical to SEQ ID NO: 197
  Synthetic: LC Ab79

SEQ ID NO: 828 - protein, 5 aa, Artificial Sequence
  Synthetic: VHCDR1 Ab80
SYAMH

SEQ ID NO: 829 - protein, 17 aa, Artificial Sequence
  Synthetic: VHCDR2 Ab80
VISYDGSNKYYADSVKG

SEQ ID NO: 830 - protein, 15 aa, Artificial Sequence
  Synthetic: VLCDR3 Ab80
GAGIGYPHGPDGFDI

SEQ ID NO: 831 - protein, 16 aa, Artificial Sequence
  Synthetic: VLCDR1 Ab80
KSSRSLLHSDGKTYVY

SEQ ID NO: 832 - protein, 7 aa, Artificial Sequence
  Synthetic: VLCDR2 Ab80
ELSNRFS

SEQ ID NO: 833 - protein, 9 aa, Artificial Sequence
  Synthetic: VLCDR3 Ab80
MQYIEAPLT

SEQ ID NO: 834 - protein, 124 aa, Artificial Sequence; identical to SEQ ID NO: 514
  Synthetic: VH Ab80

SEQ ID NO: 835 - protein, 112 aa, Artificial Sequence; identical to SEQ ID NO: 195
  Synthetic: VL Ab80

SEQ ID NO: 836 - protein, 446 aa, Artificial Sequence; identical to SEQ ID NO: 516
  Synthetic: HC Ab80

SEQ ID NO: 837 - protein, 219 aa, Artificial Sequence; identical to SEQ ID NO: 197
  Synthetic: LC Ab80

SEQ ID NO: 838 - protein, 5 aa, Artificial Sequence
  Synthetic: VHCDR1 Ab81
SYAMH

SEQ ID NO: 839 - protein, 17 aa, Artificial Sequence
  Synthetic: VHCDR2 Ab81
VISYDGSNKYYADSVKG

SEQ ID NO: 840 - protein, 15 aa, Artificial Sequence
  Synthetic: VLCDR3 Ab81
GAGRGYPYGPDGFDI

SEQ ID NO: 841 - protein, 16 aa, Artificial Sequence
  Synthetic: VLCDR1 Ab81
KSSRSLLHSDGKTYVY

SEQ ID NO: 842 - protein, 7 aa, Artificial Sequence
  Synthetic: VLCDR2 Ab81
ELSNRFS

SEQ ID NO: 843 - protein, 9 aa, Artificial Sequence
  Synthetic: VLCDR3 Ab81
MQYIEAPLT

SEQ ID NO: 844 - protein, 124 aa, Artificial Sequence; identical to SEQ ID NO: 464
  Synthetic: VH Ab81

SEQ ID NO: 845 - protein, 112 aa, Artificial Sequence; identical to SEQ ID NO: 195
  Synthetic: VL Ab81

SEQ ID NO: 846 - protein, 446 aa, Artificial Sequence; identical to SEQ ID NO: 466
  Synthetic: HC Ab81

SEQ ID NO: 847 - protein, 219 aa, Artificial Sequence; identical to SEQ ID NO: 197
  Synthetic: LC Ab81

SEQ ID NO: 848 - protein, 5 aa, Artificial Sequence
  Synthetic: VHCDR1 Ab82
SYAMH

SEQ ID NO: 849 - protein, 17 aa, Artificial Sequence
  Synthetic: VHCDR2 Ab82
VISYDGSNKYYADSVKG

SEQ ID NO: 850 - protein, 15 aa, Artificial Sequence
  Synthetic: VLCDR3 Ab82
GAGLGFPFGPDGFDI

SEQ ID NO: 851 - protein, 16 aa, Artificial Sequence
  Synthetic: VLCDR1 Ab82
KSSRSLLHSDGKTYVY

SEQ ID NO: 852 - protein, 7 aa, Artificial Sequence
  Synthetic: VLCDR2 Ab82
ELSNRFS

SEQ ID NO: 853 - protein, 9 aa, Artificial Sequence
  Synthetic: VLCDR3 Ab82
MQYIEAPLT

SEQ ID NO: 854 - protein, 124 aa, Artificial Sequence; identical to SEQ ID NO: 534
  Synthetic: VH Ab82

SEQ ID NO: 855 - protein, 112 aa, Artificial Sequence; identical to SEQ ID NO: 195
  Synthetic: VL Ab82

SEQ ID NO: 856 - protein, 446 aa, Artificial Sequence; identical to SEQ ID NO: 536
  Synthetic: HC Ab82

SEQ ID NO: 857 - protein, 219 aa, Artificial Sequence; identical to SEQ ID NO: 197
  Synthetic: LC Ab82

SEQ ID NO: 858 - protein, 5 aa, Artificial Sequence
  Synthetic: VHCDR1 Ab83
SYAMH

SEQ ID NO: 859 - protein, 17 aa, Artificial Sequence
  Synthetic: VHCDR2 Ab83
VISYDGSNKYYADSVKG

SEQ ID NO: 860 - protein, 15 aa, Artificial Sequence
  Synthetic: VLCDR3 Ab83
GAGRGFPYGPDGFDI

SEQ ID NO: 861 - protein, 16 aa, Artificial Sequence
  Synthetic: VLCDR1 Ab83
KSSRSLLHSDGKTYVY

SEQ ID NO: 862 - protein, 7 aa, Artificial Sequence
  Synthetic: VLCDR2 Ab83
ELSNRFS

SEQ ID NO: 863 - protein, 9 aa, Artificial Sequence
  Synthetic: VLCDR3 Ab83
MQYIEAPLT

SEQ ID NO: 864 - protein, 124 aa, Artificial Sequence; identical to SEQ ID NO: 544
  Synthetic: VH Ab83

SEQ ID NO: 865 - protein, 112 aa, Artificial Sequence; identical to SEQ ID NO: 195
  Synthetic: VL Ab83

SEQ ID NO: 866 - protein, 446 aa, Artificial Sequence; identical to SEQ ID NO: 546
  Synthetic: HC Ab83

SEQ ID NO: 867 - protein, 219 aa, Artificial Sequence; identical to SEQ ID NO: 197
  Synthetic: LC Ab83

SEQ ID NO: 868 - protein, 5 aa, Artificial Sequence
  Synthetic: VHCDR1 Ab84
SYAMH

SEQ ID NO: 869 - protein, 17 aa, Artificial Sequence
  Synthetic: VHCDR2 Ab84
VISYDGSNKYYADSVKG

SEQ ID NO: 870 - protein, 15 aa, Artificial Sequence
  Synthetic: VLCDR3 Ab84
GAGLGYPNGPDGFDI

SEQ ID NO: 871 - protein, 16 aa, Artificial Sequence
  Synthetic: VLCDR1 Ab84
KSSRSLLHSDGKTYVY

SEQ ID NO: 872 - protein, 7 aa, Artificial Sequence
  Synthetic: VLCDR2 Ab84
ELSNRFS

SEQ ID NO: 873 - protein, 9 aa, Artificial Sequence
  Synthetic: VLCDR3 Ab84
MQYIEAPLT

SEQ ID NO: 874 - protein, 124 aa, Artificial Sequence; identical to SEQ ID NO: 554
  Synthetic: VH Ab84

SEQ ID NO: 875 - protein, 112 aa, Artificial Sequence; identical to SEQ ID NO: 195
  Synthetic: VL Ab84

SEQ ID NO: 876 - protein, 446 aa, Artificial Sequence; identical to SEQ ID NO: 556
  Synthetic: HC Ab84

SEQ ID NO: 877 - protein, 219 aa, Artificial Sequence; identical to SEQ ID NO: 197
  Synthetic: LC Ab84

SEQ ID NO: 878 - protein, 5 aa, Artificial Sequence
  Synthetic: VHCDR1 Ab85
SYAMH

SEQ ID NO: 879 - protein, 17 aa, Artificial Sequence
  Synthetic: VHCDR2 Ab85
VISYDGSNKYYADSVKG

SEQ ID NO: 880 - protein, 15 aa, Artificial Sequence
  Synthetic: VLCDR3 Ab85
GAGQGFPYGPDGFDI

SEQ ID NO: 881 - protein, 16 aa, Artificial Sequence
  Synthetic: VLCDR1 Ab85
KSSRSLLHSDGKTYVY

SEQ ID NO: 882 - protein, 7 aa, Artificial Sequence
  Synthetic: VLCDR2 Ab85
ELSNRFS

SEQ ID NO: 883 - protein, 9 aa, Artificial Sequence
  Synthetic: VLCDR3 Ab85
MQYIEAPLT

SEQ ID NO: 884 - protein, 124 aa, Artificial Sequence; identical to SEQ ID NO: 564
  Synthetic: VH Ab85

SEQ ID NO: 885 - protein, 112 aa, Artificial Sequence; identical to SEQ ID NO: 195
  Synthetic: VL Ab85

SEQ ID NO: 886 - protein, 446 aa, Artificial Sequence; identical to SEQ ID NO: 566
  Synthetic: HC Ab85

SEQ ID NO: 887 - protein, 219 aa, Artificial Sequence; identical to SEQ ID NO: 197
  Synthetic: LC Ab85

SEQ ID NO: 888 - protein, 5 aa, Artificial Sequence
  Synthetic: VHCDR1 Ab86
SYAMH

SEQ ID NO: 889 - protein, 17 aa, Artificial Sequence
  Synthetic: VHCDR2 Ab86
VISYDGSNKYYADSVKG

SEQ ID NO: 890 - protein, 15 aa, Artificial Sequence
  Synthetic: VLCDR3 Ab86
GAGRGLTYGPDGFDI

SEQ ID NO: 891 - protein, 16 aa, Artificial Sequence
  Synthetic: VLCDR1 Ab86
KSSRSLLWSDGKTYVY

SEQ ID NO: 892 - protein, 7 aa, Artificial Sequence
  Synthetic: VLCDR2 Ab86
ELSNRFS

SEQ ID NO: 893 - protein, 9 aa, Artificial Sequence
  Synthetic: VLCDR3 Ab86
MQYIEAPLT

SEQ ID NO: 894 - protein, 124 aa, Artificial Sequence; identical to SEQ ID NO: 264
  Synthetic: VH Ab86

SEQ ID NO: 895 - protein, 112 aa, Artificial Sequence
  Synthetic: VL Ab86
DIVMTQTPLSLSVTPGQPASISCKSSRSLLWSDGKTYVYWYVQKSGQPPQLLIYELSNRFSGVPDRFSGSGSRTDFTLKISRVEAEDVGVYYCMQYIEAPLTFGGGTKVEIK

SEQ ID NO: 896 - protein, 446 aa, Artificial Sequence; identical to SEQ ID NO: 266
  Synthetic: HC Ab86

SEQ ID NO: 897 - protein, 219 aa, Artificial Sequence
  Synthetic: LC Ab86
DIVMTQTPLSLSVTPGQPASISCKSSRSLLWSDGKTYVYWYVQKSGQPPQLLIYELSNRFSGVPDRFSGSGSRTDFTLKISRVEAEDVGVYYCMQYIEAPLTFGGGTKVEIKRTVAAPSVFIFPPSDEQLKSGTASVVCLLNNFYPREAKVQWKVDNALQSGNSQESVTEQDSKDSTYSLSSTLTLSKADYEKHKVYACEVTHQGLSSPVTKSFNRGEC

SEQ ID NO: 898 - protein, 5 aa, Artificial Sequence
  Synthetic: VHCDR1 Ab87
SYAMH

SEQ ID NO: 899 - protein, 17 aa, Artificial Sequence
  Synthetic: VHCDR2 Ab87
VISYDGSNKYYADSVKG

SEQ ID NO: 900 - protein, 15 aa, Artificial Sequence
  Synthetic: VLCDR3 Ab87
GAGRGFTWGPDGFDI

SEQ ID NO: 901 - protein, 16 aa, Artificial Sequence
  Synthetic: VLCDR1 Ab87
KSSRSLLHSDGKTYVY

SEQ ID NO: 902 - protein, 7 aa, Artificial Sequence
  Synthetic: VLCDR2 Ab87
ELSNRFS

SEQ ID NO: 903 - protein, 9 aa, Artificial Sequence
  Synthetic: VLCDR3 Ab87
MQYVEAPLT

SEQ ID NO: 904 - protein, 124 aa, Artificial Sequence; identical to SEQ ID NO: 214
  Synthetic: VH Ab87

SEQ ID NO: 905 - protein, 112 aa, Artificial Sequence
  Synthetic: VL Ab87
DIVMTQTPLSLSVTPGQPASISCKSSRSLLHSDGKTYVYWYVQKSGQPPQLLIYELSNRFSGVPDRFSGSGSRTDFTLKISRVEAEDVGVYYCMQYVEAPLTFGGGTKVEIK

SEQ ID NO: 906 - protein, 446 aa, Artificial Sequence; identical to SEQ ID NO: 216
  Synthetic: HC Ab87

SEQ ID NO: 907 - protein, 219 aa, Artificial Sequence
  Synthetic: LC Ab87
DIVMTQTPLSLSVTPGQPASISCKSSRSLLHSDGKTYVYWYVQKSGQPPQLLIYELSNRFSGVPDRFSGSGSRTDFTLKISRVEAEDVGVYYCMQYVEAPLTFGGGTKVEIKRTVAAPSVFIFPPSDEQLKSGTASVVCLLNNFYPREAKVQWKVDNALQSGNSQESVTEQDSKDSTYSLSSTLTLSKADYEKHKVYACEVTHQGLSSPVTKSFNRGEC

SEQ ID NO: 908 - protein, 5 aa, Artificial Sequence
  Synthetic: VHCDR1 Ab88
SYAMH

SEQ ID NO: 909 - protein, 17 aa, Artificial Sequence
  Synthetic: VHCDR2 Ab88
VISYDGSNKYYADSVKG

SEQ ID NO: 910 - protein, 15 aa, Artificial Sequence
  Synthetic: VLCDR3 Ab88
GAGRGLTYGPDGFDI

SEQ ID NO: 911 - protein, 16 aa, Artificial Sequence
  Synthetic: VLCDR1 Ab88
KSSRSLLHSDGKTYLY

SEQ ID NO: 912 - protein, 7 aa, Artificial Sequence
  Synthetic: VLCDR2 Ab88
ELSNRFS

SEQ ID NO: 913 - protein, 9 aa, Artificial Sequence
  Synthetic: VLCDR3 Ab88
MQYIEAPLT

SEQ ID NO: 914 - protein, 124 aa, Artificial Sequence; identical to SEQ ID NO: 264
  Synthetic: VH Ab88

SEQ ID NO: 915 - protein, 112 aa, Artificial Sequence
  Synthetic: VL Ab88
DIVMTQTPLSLSVTPGQPASISCKSSRSLLHSDGKTYLYWYVQKSGQPPQLLIYELSNRFSGVPDRFSGSGSRTDFTLKISRVEAEDVGVYYCMQYIEAPLTFGGGTKVEIK

SEQ ID NO: 916 - protein, 446 aa, Artificial Sequence; identical to SEQ ID NO: 266
  Synthetic: HC Ab88

SEQ ID NO: 917 - protein, 219 aa, Artificial Sequence
  Synthetic: LC Ab88
DIVMTQTPLSLSVTPGQPASISCKSSRSLLHSDGKTYLYWYVQKSGQPPQLLIYELSNRFSGVPDRFSGSGSRTDFTLKISRVEAEDVGVYYCMQYIEAPLTFGGGTKVEIKRTVAAPSVFIFPPSDEQLKSGTASVVCLLNNFYPREAKVQWKVDNALQSGNSQESVTEQDSKDSTYSLSSTLTLSKADYEKHKVYACEVTHQGLSSPVTKSFNRGEC

SEQ ID NO: 918 - protein, 5 aa, Artificial Sequence
  Synthetic: VHCDR1 Ab89
SYAMH

SEQ ID NO: 919 - protein, 17 aa, Artificial Sequence
  Synthetic: VHCDR2 Ab89
VISYDGSNKYYADSVKG

SEQ ID NO: 920 - protein, 15 aa, Artificial Sequence
  Synthetic: VLCDR3 Ab89
GAGRGFPYGPDGFDI

SEQ ID NO: 921 - protein, 16 aa, Artificial Sequence
  Synthetic: VLCDR1 Ab89
RSSRSLLHSDGKTYVY

SEQ ID NO: 922 - protein, 7 aa, Artificial Sequence
  Synthetic: VLCDR2 Ab89
ELSNRFS

SEQ ID NO: 923 - protein, 9 aa, Artificial Sequence
  Synthetic: VLCDR3 Ab89
MQYIEAPLT

SEQ ID NO: 924 - protein, 124 aa, Artificial Sequence; identical to SEQ ID NO: 544
  Synthetic: VH Ab89

SEQ ID NO: 925 - protein, 112 aa, Artificial Sequence
  Synthetic: VL Ab89
DIVMTQTPLSLSVTPGQPASISCRSSRSLLHSDGKTYVYWYVQKSGQPPQLLIYELSNRFSGVPDRFSGSGSRTDFTLKISRVEAEDVGVYYCMQYIEVPLTFGGGTKVEIK

SEQ ID NO: 926 - protein, 446 aa, Artificial Sequence; identical to SEQ ID NO: 546
  Synthetic: HC Ab89

SEQ ID NO: 927 - protein, 219 aa, Artificial Sequence
  Synthetic: LC Ab89
DIVMTQTPLSLSVTPGQPASISCRSSRSLLHSDGKTYVYWYVQKSGQPPQLLIYELSNRFSGVPDRFSGSGSRTDFTLKISRVEAEDVGVYYCMQYIEVPLTFGGGTKVEIKRTVAAPSVFIFPPSDEQLKSGTASVVCLLNNFYPREAKVQWKVDNALQSGNSQESVTEQDSKDSTYSLSSTLTLSKADYEKHKVYACEVTHQGLSSPVTKSFNRGEC

SEQ ID NO: 928 - protein, 5 aa, Artificial Sequence
  Synthetic: VHCDR1 Ab90
SYAMH

SEQ ID NO: 929 - protein, 17 aa, Artificial Sequence
  Synthetic: VHCDR2 Ab90
VISYDGSNKYYADSVKG

SEQ ID NO: 930 - protein, 15 aa, Artificial Sequence
  Synthetic: VLCDR3 Ab90
GAGRGYPYGPDGFDI

SEQ ID NO: 931 - protein, 16 aa, Artificial Sequence
  Synthetic: VLCDR1 Ab90
TSSRSLLHSDGKTYVY

SEQ ID NO: 932 - protein, 7 aa, Artificial Sequence
  Synthetic: VLCDR2 Ab90
ELSNRFS

SEQ ID NO: 933 - protein, 9 aa, Artificial Sequence
  Synthetic: VLCDR3 Ab90
MQYVEAPLT

SEQ ID NO: 934 - protein, 124 aa, Artificial Sequence; identical to SEQ ID NO: 464
  Synthetic: VH Ab90

SEQ ID NO: 935 - protein, 112 aa, Artificial Sequence
  Synthetic: VL Ab90
DIVMTQTPLSLSVTPGQPASISCTSSRSLLHSDGKTYVYWYVQKSGQPPQLLIYELSNRFSGVPDRFSGSGSRTDFTLKISRVEAEDVGVYYCMQYVEVPLTFGGGTKVEIK

SEQ ID NO: 936 - protein, 446 aa, Artificial Sequence; identical to SEQ ID NO: 466
  Synthetic: HC Ab90

SEQ ID NO: 937 - protein, 219 aa, Artificial Sequence
  Synthetic: LC Ab90
DIVMTQTPLSLSVTPGQPASISCTSSRSLLHSDGKTYVYWYVQKSGQPPQLLIYELSNRFSGVPDRFSGSGSRTDFTLKISRVEAEDVGVYYCMQYVEVPLTFGGGTKVEIKRTVAAPSVFIFPPSDEQLKSGTASVVCLLNNFYPREAKVQWKVDNALQSGNSQESVTEQDSKDSTYSLSSTLTLSKADYEKHKVYACEVTHQGLSSPVTKSFNRGEC

SEQ ID NO: 938 - protein, 5 aa, Artificial Sequence
  Synthetic: VHCDR1 Ab91
SYAMH

SEQ ID NO: 939 - protein, 17 aa, Artificial Sequence
  Synthetic: VHCDR2 Ab91
VISYDGSNKYYADSVKG

SEQ ID NO: 940 - protein, 15 aa, Artificial Sequence
  Synthetic: VLCDR3 Ab91
GAGQGYMHGPDGFDI

SEQ ID NO: 941 - protein, 16 aa, Artificial Sequence
  Synthetic: VLCDR1 Ab91
RSSRSLLWSDGKTYVY

SEQ ID NO: 942 - protein, 7 aa, Artificial Sequence
  Synthetic: VLCDR2 Ab91
ELSNRFS

SEQ ID NO: 943 - protein, 9 aa, Artificial Sequence
  Synthetic: VLCDR3 Ab91
MQYIEAPLT

SEQ ID NO: 944 - protein, 124 aa, Artificial Sequence
  Synthetic: VH Ab91
EVQLLESGGGVVQPGRSLRLSCAASGFTFSSYAMHWVRQAPGKGLEWVAVISYDGSNKYYADSVKGRFTISRDNSKNTLSLQMNSLRVEDTAIYYCVRGAGQGYMHGPDGFDIWGQGTMVTVSS

SEQ ID NO: 945 - protein, 112 aa, Artificial Sequence
  Synthetic: VL Ab91
DIVMTQTPLSLSVTPGQPASISCRSSRSLLWSDGKTYVYWYVQKSGQPPQLLIYELSNRFSGVPDRFSGSGSRTDFTLKISRVEAEDVGVYYCMQYIEAPLTFGGGTKVEIK

SEQ ID NO: 946 - protein, 446 aa, Artificial Sequence
  Synthetic: HC Ab91
EVQLLESGGGVVQPGRSLRLSCAASGFTFSSYAMHWVRQAPGKGLEWVAVISYDGSNKYYADSVKGRFTISRDNSKNTLSLQMNSLRVEDTAIYYCVRGAGQGYMHGPDGFDIWGQGTMVTVSSKGPSVFPLAPSSRSTSESTAALGCLVKDYFPEPVTVSWNSGALTSGVHTFPAVLQSSGLYSLSSVVTVPSSNFGTQTYTCNVDHKPSNTKVDKTVERKCCVECPPCPAPPVAGPSVFLFPPKPKDTLMISRTPEVTCVVVDVSHEDPEVQFNWYVDGVEVHNAKTKPREEQFNSTFRVVSVLTVVHQDWLNGKEYKCKVSNKGLPAPIEKTISKTKGQPREPQVYTLPPSREEMTKNQVSLTCLVKGFYPSDIAVEWESNGQPENNYKTTPPMLDSDGSFFLYSKLTVDKSRWQQGNVFSCSVMHEALHNHYTQKSLSLSPG

SEQ ID NO: 947 - protein, 219 aa, Artificial Sequence
  Synthetic: LC Ab91
DIVMTQTPLSLSVTPGQPASISCRSSRSLLWSDGKTYVYWYVQKSGQPPQLLIYELSNRFSGVPDRFSGSGSRTDFTLKISRVEAEDVGVYYCMQYIEAPLTFGGGTKVEIKRTVAAPSVFIFPPSDEQLKSGTASVVCLLNNFYPREAKVQWKVDNALQSGNSQESVTEQDSKDSTYSLSSTLTLSKADYEKHKVYACEVTHQGLSSPVTKSFNRGEC

SEQ ID NO: 948 - protein, 5 aa, Artificial Sequence
  Synthetic: VHCDR1 Ab92
SYAMH

SEQ ID NO: 949 - protein, 17 aa, Artificial Sequence
  Synthetic: VHCDR2 Ab92
VISYDGSNKYYADSVKG

SEQ ID NO: 950 - protein, 15 aa, Artificial Sequence
  Synthetic: VLCDR3 Ab92
GAGHGFPTGPDGFDI

SEQ ID NO: 951 - protein, 16 aa, Artificial Sequence
  Synthetic: VLCDR1 Ab92
RSSRSLLHSDGKTYVY

SEQ ID NO: 952 - protein, 7 aa, Artificial Sequence
  Synthetic: VLCDR2 Ab92
ELSNRFS

SEQ ID NO: 953 - protein, 9 aa, Artificial Sequence
  Synthetic: VLCDR3 Ab92
MQYVEAPLT

SEQ ID NO: 954 - protein, 124 aa, Artificial Sequence
  Synthetic: VH Ab92
EVQLLESGGGVVQPGRSLRLSCAASGFTFSSYAMHWVRQAPGKGLEWVAVISYDGSNKYYADSVKGRFTISRDNSKNTLSLQMNSLRVEDTAIYYCVRGAGHGFPTGPDGFDIWGQGTMVTVSS

SEQ ID NO: 955 - protein, 112 aa, Artificial Sequence
  Synthetic: VL Ab92
DIVMTQTPLSLSVTPGQPASISCRSSRSLLHSDGKTYVYWYVQKSGQPPQLLIYELSNRFSGVPDRFSGSGSRTDFTLKISRVEAEDVGVYYCMQYVEAPLTFGGGTKVEIK

SEQ ID NO: 956 - protein, 446 aa, Artificial Sequence
  Synthetic: HC Ab92
EVQLLESGGGVVQPGRSLRLSCAASGFTFSSYAMHWVRQAPGKGLEWVAVISYDGSNKYYADSVKGRFTISRDNSKNTLSLQMNSLRVEDTAIYYCVRGAGHGFPTGPDGFDIWGQGTMVTVSSKGPSVFPLAPSSRSTSESTAALGCLVKDYFPEPVTVSWNSGALTSGVHTFPAVLQSSGLYSLSSVVTVPSSNFGTQTYTCNVDHKPSNTKVDKTVERKCCVECPPCPAPPVAGPSVFLFPPKPKDTLMISRTPEVTCVVVDVSHEDPEVQFNWYVDGVEVHNAKTKPREEQFNSTFRVVSVLTVVHQDWLNGKEYKCKVSNKGLPAPIEKTISKTKGQPREPQVYTLPPSREEMTKNQVSLTCLVKGFYPSDIAVEWESNGQPENNYKTTPPMLDSDGSFFLYSKLTVDKSRWQQGNVFSCSVMHEALHNHYTQKSLSLSPG

SEQ ID NO: 957 - protein, 219 aa, Artificial Sequence
  Synthetic: LC Ab92
DIVMTQTPLSLSVTPGQPASISCRSSRSLLHSDGKTYVYWYVQKSGQPPQLLIYELSNRFSGVPDRFSGSGSRTDFTLKISRVEAEDVGVYYCMQYVEAPLTFGGGTKVEIKRTVAAPSVFIFPPSDEQLKSGTASVVCLLNNFYPREAKVQWKVDNALQSGNSQESVTEQDSKDSTYSLSSTLTLSKADYEKHKVYACEVTHQGLSSPVTKSFNRGEC

SEQ ID NO: 958 - protein, 5 aa, Artificial Sequence
  Synthetic: VHCDR1 Ab93
SYAMH

SEQ ID NO: 959 - protein, 17 aa, Artificial Sequence
  Synthetic: VHCDR2 Ab93
VISYDGSNKYYADSVKG

SEQ ID NO: 960 - protein, 15 aa, Artificial Sequence
  Synthetic: VLCDR3 Ab93
GAGLGFPYGPDGFDI

SEQ ID NO: 961 - protein, 16 aa, Artificial Sequence
  Synthetic: VLCDR1 Ab93
KSSRSLLHSDGKTYLY

SEQ ID NO: 962 - protein, 7 aa, Artificial Sequence
  Synthetic: VLCDR2 Ab93
ELSNRFS

SEQ ID NO: 963 - protein, 9 aa, Artificial Sequence
  Synthetic: VLCDR3 Ab93
MQYIEAPLT

SEQ ID NO: 964 - protein, 124 aa, Artificial Sequence; identical to SEQ ID NO: 444
  Synthetic: VH Ab93

SEQ ID NO: 965 - protein, 112 aa, Artificial Sequence; identical to SEQ ID NO: 915
  Synthetic: VL Ab93

SEQ ID NO: 966 - protein, 446 aa, Artificial Sequence; identical to SEQ ID NO: 446
  Synthetic: HC Ab93

SEQ ID NO: 967 - protein, 219 aa, Artificial Sequence; identical to SEQ ID NO: 917
  Synthetic: LC Ab93

SEQ ID NO: 968 - protein, 5 aa, Artificial Sequence
  Synthetic: VHCDR1 Ab94
SYAMH

SEQ ID NO: 969 - protein, 17 aa, Artificial Sequence
  Synthetic: VHCDR2 Ab94
VISYDGSNKYYADSVKG

SEQ ID NO: 970 - protein, 15 aa, Artificial Sequence
  Synthetic: VLCDR3 Ab94
GAGLGWPYGPDGFDI

SEQ ID NO: 971 - protein, 16 aa, Artificial Sequence
  Synthetic: VLCDR1 Ab94
RSSRSLLHSDGKTYVY

SEQ ID NO: 972 - protein, 7 aa, Artificial Sequence
  Synthetic: VLCDR2 Ab94
ELSNRFS

SEQ ID NO: 973 - protein, 9 aa, Artificial Sequence
  Synthetic: VLCDR3 Ab94
MQYIEAPLT

SEQ ID NO: 974 - protein, 124 aa, Artificial Sequence; identical to SEQ ID NO: 244
  Synthetic: VH Ab94

SEQ ID NO: 975 - protein, 112 aa, Artificial Sequence; identical to SEQ ID NO: 395
  Synthetic: VL Ab94

SEQ ID NO: 976 - protein, 446 aa, Artificial Sequence; identical to SEQ ID NO: 246
  Synthetic: HC Ab94

SEQ ID NO: 977 - protein, 219 aa, Artificial Sequence; identical to SEQ ID NO: 397
  Synthetic: LC Ab94

SEQ ID NO: 978 - protein, 5 aa, Artificial Sequence
  Synthetic: VHCDR1 Ab95
SYAMH

SEQ ID NO: 979 - protein, 17 aa, Artificial Sequence
  Synthetic: VHCDR2 Ab95
VISYDGSNKYYADSVKG

SEQ ID NO: 980 - protein, 15 aa, Artificial Sequence
  Synthetic: VLCDR3 Ab95
GAGLGWPYGPDGFDI

SEQ ID NO: 981 - protein, 16 aa, Artificial Sequence
  Synthetic: VLCDR1 Ab95
TSSRSLLHSDGKTYVY

SEQ ID NO: 982 - protein, 7 aa, Artificial Sequence
  Synthetic: VLCDR2 Ab95
ELSNRFS

SEQ ID NO: 983 - protein, 9 aa, Artificial Sequence
  Synthetic: VLCDR3 Ab95
MQYIEAPLT

SEQ ID NO: 984 - protein, 124 aa, Artificial Sequence; identical to SEQ ID NO: 244
  Synthetic: VH Ab95

SEQ ID NO: 985 - protein, 112 aa, Artificial Sequence; identical to SEQ ID NO: 184
  Synthetic: VL Ab95

SEQ ID NO: 986 - protein, 446 aa, Artificial Sequence; identical to SEQ ID NO: 246
  Synthetic: HC Ab95

SEQ ID NO: 987 - protein, 219 aa, Artificial Sequence; identical to SEQ ID NO: 187
  Synthetic: LC Ab95

SEQ ID NO: 988 - protein, 5 aa, Artificial Sequence
  Synthetic: VHCDR1 Ab96
SYAMH

SEQ ID NO: 989 - protein, 17 aa, Artificial Sequence
  Synthetic: VHCDR2 Ab96
VISYDGSNKYYADSVKG

SEQ ID NO: 990 - protein, 15 aa, Artificial Sequence
  Synthetic: VLCDR3 Ab96
GAGLGWPYGPDGFDI

SEQ ID NO: 991 - protein, 16 aa, Artificial Sequence
  Synthetic: VLCDR1 Ab96
KSSRSLLHSDGKTYVY

SEQ ID NO: 992 - protein, 7 aa, Artificial Sequence
  Synthetic: VLCDR2 Ab96
ELSNRFS

SEQ ID NO: 993 - protein, 9 aa, Artificial Sequence
  Synthetic: VLCDR3 Ab96
MQYIEAPLT

SEQ ID NO: 994 - protein, 124 aa, Artificial Sequence; identical to SEQ ID NO: 244
  Synthetic: VH Ab96

SEQ ID NO: 995 - protein, 112 aa, Artificial Sequence; identical to SEQ ID NO: 195
  Synthetic: VL Ab96

SEQ ID NO: 996 - protein, 446 aa, Artificial Sequence; identical to SEQ ID NO: 246
  Synthetic: HC Ab96

SEQ ID NO: 997 - protein, 219 aa, Artificial Sequence; identical to SEQ ID NO: 197
  Synthetic: LC Ab96

SEQ ID NO: 998 - protein, 5 aa, Artificial Sequence
  Synthetic: VHCDR1 Ab97
SYAMH

SEQ ID NO: 999 - protein, 17 aa, Artificial Sequence
  Synthetic: VHCDR2 Ab97
VISYDGSNKYYADSVKG

SEQ ID NO: 1000 - protein, 15 aa, Artificial Sequence
  Synthetic: VLCDR3 Ab97
GAGLGWPYGPDGFDI

SEQ ID NO: 1001 - protein, 16 aa, Artificial Sequence
  Synthetic: VLCDR1 Ab97
KSSRSLLHSDGKTYVY

SEQ ID NO: 1002 - protein, 7 aa, Artificial Sequence
  Synthetic: VLCDR2 Ab97
ELSNRFS

SEQ ID NO: 1003 - protein, 9 aa, Artificial Sequence
  Synthetic: VLCDR3 Ab97
MQYVEAPLT

SEQ ID NO: 1004 - protein, 124 aa, Artificial Sequence; identical to SEQ ID NO: 244
  Synthetic: VH Ab97

SEQ ID NO: 1005 - protein, 112 aa, Artificial Sequence; identical to SEQ ID NO: 905
  Synthetic: VL Ab97

SEQ ID NO: 1006 - protein, 446 aa, Artificial Sequence; identical to SEQ ID NO: 246
  Synthetic: HC Ab97

SEQ ID NO: 1007 - protein, 219 aa, Artificial Sequence; identical to SEQ ID NO: 907
  Synthetic: LC Ab97

SEQ ID NO: 1008 - protein, 5 aa, Artificial Sequence
  Synthetic: VHCDR1 Ab98
SYAMH

SEQ ID NO: 1009 - protein, 17 aa, Artificial Sequence
  Synthetic: VHCDR2 Ab98
VISYDGSNKYYADSVKG

SEQ ID NO: 1010 - protein, 15 aa, Artificial Sequence
  Synthetic: VLCDR3 Ab98
GAGLGWPYGPDGFDI

SEQ ID NO: 1011 - protein, 16 aa, Artificial Sequence
  Synthetic: VLCDR1 Ab98
TSSRSLLHSDGKTYVY

SEQ ID NO: 1012 - protein, 7 aa, Artificial Sequence
  Synthetic: VLCDR2 Ab98
ELSNRFS

SEQ ID NO: 1013 - protein, 9 aa, Artificial Sequence
  Synthetic: VLCDR3 Ab98
MQYVEAPLT

SEQ ID NO: 1014 - protein, 124 aa, Artificial Sequence; identical to SEQ ID NO: 244
  Synthetic: VH Ab98

SEQ ID NO: 1015 - protein, 112 aa, Artificial Sequence; identical to SEQ ID NO: 935
  Synthetic: VL Ab98

SEQ ID NO: 1016 - protein, 446 aa, Artificial Sequence; identical to SEQ ID NO: 246
  Synthetic: HC Ab98

SEQ ID NO: 1017 - protein, 219 aa, Artificial Sequence; identical to SEQ ID NO: 937
  Synthetic: LC Ab98

SEQ ID NO: 1018 - protein, 5 aa, Artificial Sequence
  Synthetic: VHCDR1 Ab99
SYAMH

SEQ ID NO: 1019 - protein, 17 aa, Artificial Sequence
  Synthetic: VHCDR2 Ab99
VISYDGSNKYYADSVKG

SEQ ID NO: 1020 - protein, 15 aa, Artificial Sequence
  Synthetic: VLCDR3 Ab99
GAGLGWPYGPDGFDI

SEQ ID NO: 1021 - protein, 16 aa, Artificial Sequence
  Synthetic: VLCDR1 Ab99
RSSRSLLWSDGKTYVY

SEQ ID NO: 1022 - protein, 7 aa, Artificial Sequence
  Synthetic: VLCDR2 Ab99
ELSNRFS

SEQ ID NO: 1023 - protein, 9 aa, Artificial Sequence
  Synthetic: VLCDR3 Ab99
MQYIEAPLT

SEQ ID NO: 1024 - protein, 124 aa, Artificial Sequence; identical to SEQ ID NO: 244
  Synthetic: VH Ab99

SEQ ID NO: 1025 - protein, 112 aa, Artificial Sequence; identical to SEQ ID NO: 945
  Synthetic: VL Ab99

SEQ ID NO: 1026 - protein, 446 aa, Artificial Sequence; identical to SEQ ID NO: 246
  Synthetic: HC Ab99

SEQ ID NO: 1027 - protein, 219 aa, Artificial Sequence; identical to SEQ ID NO: 947
  Synthetic: LC Ab99

SEQ ID NO: 1028 - protein, 5 aa, Artificial Sequence
  Synthetic: VHCDR1 Ab100
SYAMH

SEQ ID NO: 1029 - protein, 17 aa, Artificial Sequence
  Synthetic: VHCDR2 Ab100
VISYDGSNKYYADSVKG

SEQ ID NO: 1030 - protein, 15 aa, Artificial Sequence
  Synthetic: VLCDR3 Ab100
GAGLGWPYGPDGFDI

SEQ ID NO: 1031 - protein, 16 aa, Artificial Sequence
  Synthetic: VLCDR1 Ab100
KSSRSLLWSDGKTYVY

SEQ ID NO: 1032 - protein, 7 aa, Artificial Sequence
  Synthetic: VLCDR2 Ab100
ELSNRFS

SEQ ID NO: 1033 - protein, 9 aa, Artificial Sequence
  Synthetic: VLCDR3 Ab100
MQYVEAPLT

SEQ ID NO: 1034 - protein, 124 aa, Artificial Sequence; identical to SEQ ID NO: 244
  Synthetic: VH Ab100

SEQ ID NO: 1035 - protein, 112 aa, Artificial Sequence
  Synthetic: VL Ab100
DIVMTQTPLSLSVTPGQPASISCKSSRSLLWSDGKTYVYWYVQKSGQPPQLLIYELSNRFSGVPDRFSGSGSRTDFTLKISRVEAEDVGVYYCMQYVEAPLTFGGGTKVEIK

SEQ ID NO: 1036 - protein, 446 aa, Artificial Sequence; identical to SEQ ID NO: 246
  Synthetic: HC Ab100

SEQ ID NO: 1037 - protein, 219 aa, Artificial Sequence
  Synthetic: LC Ab100
DIVMTQTPLSLSVTPGQPASISCKSSRSLLWSDGKTYVYWYVQKSGQPPQLLIYELSNRFSGVPDRFSGSGSRTDFTLKISRVEAEDVGVYYCMQYVEAPLTFGGGTKVEIKRTVAAPSVFIFPPSDEQLKSGTASVVCLLNNFYPREAKVQWKVDNALQSGNSQESVTEQDSKDSTYSLSSTLTLSKADYEKHKVYACEVTHQGLSSPVTKSFNRGEC

SEQ ID NO: 1038 - protein, 5 aa, Artificial Sequence
  Synthetic: VHCDR1 Ab101
SYAMH

SEQ ID NO: 1039 - protein, 17 aa, Artificial Sequence
  Synthetic: VHCDR2 Ab101
VISYDGSNKYYADSVKG

SEQ ID NO: 1040 - protein, 15 aa, Artificial Sequence
  Synthetic: VLCDR3 Ab101
GAGRGFTLGPDGFDI

SEQ ID NO: 1041 - protein, 16 aa, Artificial Sequence
  Synthetic: VLCDR1 Ab101
RSSRSLLHSDGKTYVY

SEQ ID NO: 1042 - protein, 7 aa, Artificial Sequence
  Synthetic: VLCDR2 Ab101
ELSNRFS

SEQ ID NO: 1043 - protein, 9 aa, Artificial Sequence
  Synthetic: VLCDR3 Ab101
MQYIEAPLT

SEQ ID NO: 1044 - protein, 124 aa, Artificial Sequence; identical to SEQ ID NO: 224
  Synthetic: VH Ab101

SEQ ID NO: 1045 - protein, 112 aa, Artificial Sequence; identical to SEQ ID NO: 395
  Synthetic: VL Ab101

SEQ ID NO: 1046 - protein, 446 aa, Artificial Sequence; identical to SEQ ID NO: 226
  Synthetic: HC Ab101

SEQ ID NO: 1047 - protein, 219 aa, Artificial Sequence; identical to SEQ ID NO: 397
  Synthetic: LC Ab101

SEQ ID NO: 1048 - protein, 5 aa, Artificial Sequence
  Synthetic: VHCDR1 Ab102
SYAMH

SEQ ID NO: 1049 - protein, 17 aa, Artificial Sequence
  Synthetic: VHCDR2 Ab102
VISYDGSNKYYADSVKG

SEQ ID NO: 1050 - protein, 15 aa, Artificial Sequence
  Synthetic: VLCDR3 Ab102
GAGRGFTLGPDGFDI

SEQ ID NO: 1051 - protein, 16 aa, Artificial Sequence
  Synthetic: VLCDR1 Ab102
TSSRSLLHSDGKTYVY

SEQ ID NO: 1052 - protein, 7 aa, Artificial Sequence
  Synthetic: VLCDR2 Ab102
ELSNRFS

SEQ ID NO: 1053 - protein, 9 aa, Artificial Sequence
  Synthetic: VLCDR3 Ab102
MQYIEAPLT

SEQ ID NO: 1054 - protein, 124 aa, Artificial Sequence; identical to SEQ ID NO: 224
  Synthetic: VH Ab102

SEQ ID NO: 1055 - protein, 112 aa, Artificial Sequence; identical to SEQ ID NO: 184
  Synthetic: VL Ab102

SEQ ID NO: 1056 - protein, 446 aa, Artificial Sequence; identical to SEQ ID NO: 226
  Synthetic: HC Ab102

SEQ ID NO: 1057 - protein, 219 aa, Artificial Sequence; identical to SEQ ID NO: 187
  Synthetic: LC Ab102

SEQ ID NO: 1058 - protein, 5 aa, Artificial Sequence
  Synthetic: VHCDR1 Ab103
SYAMH

SEQ ID NO: 1059 - protein, 17 aa, Artificial Sequence
  Synthetic: VHCDR2 Ab103
VISYDGSNKYYADSVKG

SEQ ID NO: 1060 - protein, 15 aa, Artificial Sequence
  Synthetic: VLCDR3 Ab103
GAGRGFTLGPDGFDI

SEQ ID NO: 1061 - protein, 16 aa, Artificial Sequence
  Synthetic: VLCDR1 Ab103
KSSRSLLHSDGKTYVY

SEQ ID NO: 1062 - protein, 7 aa, Artificial Sequence
  Synthetic: VLCDR2 Ab103
ELSNRFS

SEQ ID NO: 1063 - protein, 9 aa, Artificial Sequence
  Synthetic: VLCDR3 Ab103
MQYIEAPLT

SEQ ID NO: 1064 - protein, 124 aa, Artificial Sequence; identical to SEQ ID NO: 224
  Synthetic: VH Ab103

SEQ ID NO: 1065 - protein, 112 aa, Artificial Sequence; identical to SEQ ID NO: 195
  Synthetic: VL Ab103

SEQ ID NO: 1066 - protein, 446 aa, Artificial Sequence; identical to SEQ ID NO: 226
  Synthetic: HC Ab103

SEQ ID NO: 1067 - protein, 219 aa, Artificial Sequence; identical to SEQ ID NO: 197
  Synthetic: LC Ab103

SEQ ID NO: 1068 - protein, 5 aa, Artificial Sequence
  Synthetic: VHCDR1 Ab104
SYAMH

SEQ ID NO: 1069 - protein, 17 aa, Artificial Sequence
  Synthetic: VHCDR2 Ab104
VISYDGSNKYYADSVKG

SEQ ID NO: 1070 - protein, 15 aa, Artificial Sequence
  Synthetic: VLCDR3 Ab104
GAGRGFTLGPDGFDI

SEQ ID NO: 1071 - protein, 16 aa, Artificial Sequence
  Synthetic: VLCDR1 Ab104
KSSRSLLHSDGKTYVY

SEQ ID NO: 1072 - protein, 7 aa, Artificial Sequence
  Synthetic: VLCDR2 Ab104
ELSNRFS

SEQ ID NO: 1073 - protein, 9 aa, Artificial Sequence
  Synthetic: VLCDR3 Ab104
MQYVEAPLT

SEQ ID NO: 1074 - protein, 124 aa, Artificial Sequence; identical to SEQ ID NO: 224
  Synthetic: VH Ab104

SEQ ID NO: 1075 - protein, 112 aa, Artificial Sequence; identical to SEQ ID NO: 905
  Synthetic: VL Ab104

SEQ ID NO: 1076 - protein, 446 aa, Artificial Sequence; identical to SEQ ID NO: 226
  Synthetic: HC Ab104

SEQ ID NO: 1077 - protein, 219 aa, Artificial Sequence; identical to SEQ ID NO: 907
  Synthetic: LC Ab104

SEQ ID NO: 1078 - protein, 5 aa, Artificial Sequence
  Synthetic: VHCDR1 Ab105
SYAMH

SEQ ID NO: 1079 - protein, 17 aa, Artificial Sequence
  Synthetic: VHCDR2 Ab105
VISYDGSNKYYADSVKG

SEQ ID NO: 1080 - protein, 15 aa, Artificial Sequence
  Synthetic: VLCDR3 Ab105
GAGRGFTLGPDGFDI

SEQ ID NO: 1081 - protein, 16 aa, Artificial Sequence
  Synthetic: VLCDR1 Ab105
TSSRSLLHSDGKTYVY

SEQ ID NO: 1082 - protein, 7 aa, Artificial Sequence
  Synthetic: VLCDR2 Ab105
ELSNRFS

SEQ ID NO: 1083 - protein, 9 aa, Artificial Sequence
  Synthetic: VLCDR3 Ab105
MQYVEAPLT

SEQ ID NO: 1084 - protein, 124 aa, Artificial Sequence; identical to SEQ ID NO: 224
  Synthetic: VH Ab105

SEQ ID NO: 1085 - protein, 112 aa, Artificial Sequence; identical to SEQ ID NO: 935
  Synthetic: VL Ab105

SEQ ID NO: 1086 - protein, 446 aa, Artificial Sequence; identical to SEQ ID NO: 226
  Synthetic: HC Ab105

SEQ ID NO: 1087 - protein, 219 aa, Artificial Sequence; identical to SEQ ID NO: 937
  Synthetic: LC Ab105

SEQ ID NO: 1088 - protein, 5 aa, Artificial Sequence
  Synthetic: VHCDR1 Ab106
SYAMH

SEQ ID NO: 1089 - protein, 17 aa, Artificial Sequence
  Synthetic: VHCDR2 Ab106
VISYDGSNKYYADSVKG

SEQ ID NO: 1090 - protein, 15 aa, Artificial Sequence
  Synthetic: VLCDR3 Ab106
GAGRGFTLGPDGFDI

SEQ ID NO: 1091 - protein, 16 aa, Artificial Sequence
  Synthetic: VLCDR1 Ab106
RSSRSLLWSDGKTYVY

SEQ ID NO: 1092 - protein, 7 aa, Artificial Sequence
  Synthetic: VLCDR2 Ab106
ELSNRFS

SEQ ID NO: 1093 - protein, 9 aa, Artificial Sequence
  Synthetic: VLCDR3 Ab106
MQYIEAPLT

SEQ ID NO: 1094 - protein, 124 aa, Artificial Sequence; identical to SEQ ID NO: 224
  Synthetic: VH Ab106

SEQ ID NO: 1095 - protein, 112 aa, Artificial Sequence; identical to SEQ ID NO: 945
  Synthetic: VL Ab106

SEQ ID NO: 1096 - protein, 446 aa, Artificial Sequence; identical to SEQ ID NO: 226
  Synthetic: HC Ab106

SEQ ID NO: 1097 - protein, 219 aa, Artificial Sequence; identical to SEQ ID NO: 947
  Synthetic: LC Ab106

SEQ ID NO: 1098 - protein, 5 aa, Artificial Sequence
  Synthetic: VHCDR1 Ab107
SYAMH

SEQ ID NO: 1099 - protein, 17 aa, Artificial Sequence
  Synthetic: VHCDR2 Ab107
VISYDGSNKYYADSVKG

SEQ ID NO: 1100 - protein, 15 aa, Artificial Sequence
  Synthetic: VLCDR3 Ab107
GAGRGFTLGPDGFDI

SEQ ID NO: 1101 - protein, 16 aa, Artificial Sequence
  Synthetic: VLCDR1 Ab107
KSSRSLLWSDGKTYVY

SEQ ID NO: 1102 - protein, 7 aa, Artificial Sequence
  Synthetic: VLCDR2 Ab107
ELSNRFS

SEQ ID NO: 1103 - protein, 9 aa, Artificial Sequence
  Synthetic: VLCDR3 Ab107
MQYVEAPLT

SEQ ID NO: 1104 - protein, 124 aa, Artificial Sequence; identical to SEQ ID NO: 224
  Synthetic: VH Ab107

SEQ ID NO: 1105 - protein, 112 aa, Artificial Sequence; identical to SEQ ID NO: 1035
  Synthetic: VL Ab107

SEQ ID NO: 1106 - protein, 446 aa, Artificial Sequence; identical to SEQ ID NO: 226
  Synthetic: HC Ab107

SEQ ID NO: 1107 - protein, 219 aa, Artificial Sequence; identical to SEQ ID NO: 1037
  Synthetic: LC Ab107

SEQ ID NO: 1108 - protein, 5 aa, Artificial Sequence
  Synthetic: Vh1 CDR1
SYAMH

SEQ ID NO: 1109 - protein, 17 aa, Artificial Sequence
  Synthetic: Vh1 CDR2
VISYDGSNKYYADSVKG

SEQ ID NO: 1110 - protein, 15 aa, Artificial Sequence
  Synthetic: Vh1 CDR3
GAGRGYTYGPDGFDI

SEQ ID NO: 1111 - protein, 124 aa, Artificial Sequence
  Synthetic: Vh1
EVQLVESGGGVVQPGRSLRLSCAASGFTFSSYAMHWVRQAPGKGLEWVAVISYDGSNKYYADSVKGRFTISRDNSKNTLYLQMNSLRAEDTAIYYCVRGAGRGYTYGPDGFDIWGQGTMVTVSS

SEQ ID NO: 1112 - protein, 5 aa, Artificial Sequence
  Synthetic: Vh2 CDR1
SYAMH

SEQ ID NO: 1113 - protein, 17 aa, Artificial Sequence
  Synthetic: Vh2 CDR2
VISYDGSNKYYADSVKG

SEQ ID NO: 1114 - protein, 15 aa, Artificial Sequence
  Synthetic: Vh2 CDR3
GAGRGYTYGPDGFDI

SEQ ID NO: 1115 - protein, 124 aa, Artificial Sequence
  Synthetic: Vh2
EVQLVESGGGVVQPGRSLRLSCAASGFTFSSYAMHWVRQAPGKGLEWVAVISYDGSNKYYADSVKGRFTISRDNSKNTLYLQMNSLRAEDTAVYYCARGAGRGYTYGPDGFDIWGQGTMVTVSS

SEQ ID NO: 1116 - protein, 16 aa, Artificial Sequence
  Synthetic: Vk1 CDR1
TSSRSLLHSDGKTYLY

SEQ ID NO: 1117 - protein, 7 aa, Artificial Sequence
  Synthetic: Vk1 CDR2
ELSNRFS

SEQ ID NO: 1118 - protein, 9 aa, Artificial Sequence
  Synthetic: Vk1 CDR3
MQYIEAPLT

SEQ ID NO: 1119 - protein, 112 aa, Artificial Sequence
  Synthetic: Vk1
DIVMTQTPLSLSVTPGQPASISCTSSRSLLHSDGKTYLYWYLQKPGQPPQLLIYELSNRFSGVPDRFSGSGSRTDFTLKISRVEAEDVGVYYCMQYIEAPLTFGGGTKVEIK

SEQ ID NO: 1120 - protein, 16 aa, Artificial Sequence
  Synthetic: Vk2 CDR1
TSSRSLLHSDGKTYVY

SEQ ID NO: 1121 - protein, 7 aa, Artificial Sequence
  Synthetic: Vk2 CDR2
ELSNRFS

SEQ ID NO: 1122 - protein, 9 aa, Artificial Sequence
  Synthetic: Vk2 CDR3
MQYIEAPLT

SEQ ID NO: 1123 - protein, 112 aa, Artificial Sequence
  Synthetic: Vk2
DIVMTQTPLSLSVTPGQPASISCTSSRSLLHSDGKTYVYWYLQKPGQPPQLLIYELSNRFSGVPDRFSGSGSRTDFTLKISRVEAEDVGVYYCMQYIEAPLTFGGGTKVEIK

SEQ ID NO: 1124 - protein, 16 aa, Artificial Sequence
  Synthetic: Vk3 CDR1
TSSRSLLHSDGKTYVY

SEQ ID NO: 1125 - protein, 7 aa, Artificial Sequence
  Synthetic: Vk3 CDR2
ELSNRFS

SEQ ID NO: 1126 - protein, 9 aa, Artificial Sequence
  Synthetic: Vk3 CDR3
MQYIEAPLT

SEQ ID NO: 1127 - protein, 112 aa, Artificial Sequence
  Synthetic: Vk3
DIVMTQTPLSLSVTPGQPASISCTSSRSLLHSDGKTYVYWYLQKSGQPPQLLIYELSNRFSGVPDRFSGSGSRTDFTLKISRVEAEDVGVYYCMQYIEAPLTFGGGTKVEIK

SEQ ID NO: 1128 - protein, 16 aa, Artificial Sequence
  Synthetic: Vk4 CDR1
TSSRSLLHSDGKTYVY

SEQ ID NO: 1129 - protein, 7 aa, Artificial Sequence
  Synthetic: Vk4 CDR2
ELSNRFS

SEQ ID NO: 1130 - protein, 9 aa, Artificial Sequence
  Synthetic: Vk4 CDR3
MQYIEAPLT

SEQ ID NO: 1131 - protein, 112 aa, Artificial Sequence
  Synthetic: Vk4
DIVMTQTPLSLSVTPGQPASISCTSSRSLLHSDGKTYVYWYVQKPGQPPQLLIYELSNRFSGVPDRFSGSGSRTDFTLKISRVEAEDVGVYYCMQYIEAPLTFGGGTKVEIK

SEQ ID NO: 1132 - protein, 16 aa, Artificial Sequence
  Synthetic: Vk5 CDR1
RSSRSLLHSDGKTYVY

SEQ ID NO: 1133 - protein, 7 aa, Artificial Sequence
  Synthetic: Vk5 CDR2
ELSNRFS

SEQ ID NO: 1134 - protein, 9 aa, Artificial Sequence
  Synthetic: Vk5 CDR3
MQYIEAPLT

SEQ ID NO: 1135 - protein, 112 aa, Artificial Sequence
  Synthetic: Vk5
DIVMTQTPLSLSVTPGQPASISCRSSRSLLHSDGKTYVYWYLQKPGQPPQLLIYELSNRFSGVPDRFSGSGSGTDFTLKISRVEAEDVGVYYCMQYIEAPLTFGGGTKVEIK

SEQ ID NO: 1136 - protein, 16 aa, Artificial Sequence
  Synthetic: Vk6 CDR1
KSSQSLLHSDGKTYLY

SEQ ID NO: 1137 - protein, 7 aa, Artificial Sequence
  Synthetic: Vk6 CDR2
ELSNRFS

SEQ ID NO: 1138 - protein, 9 aa, Artificial Sequence
  Synthetic: Vk6 CDR3
MQYIEAPLT

SEQ ID NO: 1139 - protein, 112 aa, Artificial Sequence
  Synthetic: Vk6
DIVMTQTPLSLSVTPGQPASISCKSSQSLLHSDGKTYLYWYLQKPGQPPQLLIYELSNRFSGVPDRFSGSGSGTDFTLKISRVEAEDVGVYYCMQYIEAPLTFGGGTKVEIK

SEQ ID NO: 1140 - protein, 16 aa, Artificial Sequence
  Synthetic: Vk7 CDR1
KSSQSLLHSDGKTYLY

SEQ ID NO: 1141 - protein, 7 aa, Artificial Sequence
  Synthetic: Vk7 CDR2
ELSNRFS

SEQ ID NO: 1142 - protein, 9 aa, Artificial Sequence
  Synthetic: Vk7 CDR3
MQYIEAPLT

SEQ ID NO: 1143 - protein, 112 aa, Artificial Sequence
  Synthetic: Vk7
DIVMTQSPLSLPVTPGEPASISCKSSQSLLHSDGKTYLYWYLQKPGQPPQLLIYELSNRFSGVPDRFSGSGSGTDFTLKISRVEAEDVGVYYCMQYIEAPLTFGGGTKVEIK

SEQ ID NO: 1144 - protein, 16 aa, Artificial Sequence
  Synthetic: Vk8 CDR1
TSSRSLLHSDGKTYVY

SEQ ID NO: 1145 - protein, 7 aa, Artificial Sequence
  Synthetic: Vk8 CDR2
YLGNRFS

SEQ ID NO: 1146 - protein, 9 aa, Artificial Sequence
  Synthetic: Vk8 CDR3
MQYIEAPLT

SEQ ID NO: 1147 - protein, 112 aa, Artificial Sequence
  Synthetic: Vk8
DIVMTQTPLSLSVTPGQPASISCTSSRSLLHSDGKTYVYWYLQKPGQPPQLLIIYLGNRFSGVPDRFSGSGSRTDFTLKISRVEAEDVGVYYCMQYIEAPLTFGGGTKVEIK

SEQ ID NO: 1148 - protein, 16 aa, Artificial Sequence
  Synthetic: Vk9 CDR1
TSSRSLLHSDGKTYVY

SEQ ID NO: 1149 - protein, 7 aa, Artificial Sequence
  Synthetic: Vk9 CDR2
ELSNRFS

SEQ ID NO: 1150 - protein, 9 aa, Artificial Sequence
  Synthetic: Vk9 CDR3
MQYIEAPLT

SEQ ID NO: 1151 - protein, 112 aa, Artificial Sequence
  Synthetic: Vk9
DIVMTQSPDSLAVSLGERATINCKSSQSLLHSDGKTYVYWYQQKPGQPPKLLIYELSNRFSGVPDRFSGSGSGTDFTLTISSLQAEDVAVYYCMQYIEAPLTFGGGTKVEIK

SEQ ID NO: 1152 - protein, 16 aa, Artificial Sequence
  Synthetic: Vk10 CDR1
TSSRSLLHSDGKTYVY

SEQ ID NO: 1153 - protein, 7 aa, Artificial Sequence
  Synthetic: Vk10 CDR2
ELSNRFS

SEQ ID NO: 1154 - protein, 9 aa, Artificial Sequence
  Synthetic: Vk10 CDR3
MQYIEAPLT

SEQ ID NO: 1155 - protein, 112 aa, Artificial Sequence
  Synthetic: Vk10
DIVMTQSPDSLAVSLGERATISCTSSRSLLHSDGKTYVYWYQQKPGQPPKLLIYELSNRFSGVPDRFSGSGSRTDFTLTISSLQAEDVAVYYCMQYIEAPLTFGGGTKVEIK

SEQ ID NO: 1156 - protein, 16 aa, Artificial Sequence
  Synthetic: Vk11 CDR1
TSSRSLLHSDGKTYVY

SEQ ID NO: 1157 - protein, 7 aa, Artificial Sequence
  Synthetic: Vk11 CDR2
ELSNRFS

SEQ ID NO: 1158 - protein, 9 aa, Artificial Sequence
  Synthetic: Vk11 CDR3
MQYIEAPLT

SEQ ID NO: 1159 - protein, 112 aa, Artificial Sequence
  Synthetic: Vk11
DIVMTQSPLSLPVTPGEPASISCTSSRSLLHSDGKTYVYWYLQKPGQSPQVLIYELSNRFSGVPDRFSGSGSGTDFTLKISRVEAEDVGVYYCMQYIEAPLTFGGGTKVEIK

SEQ ID NO: 1160 - protein, 16 aa, Artificial Sequence
  Synthetic: Vk12 CDR1
TSSRSLLHSDGKTYVY

SEQ ID NO: 1161 - protein, 7 aa, Artificial Sequence
  Synthetic: Vk12 CDR2
ELSNRFS

SEQ ID NO: 1162 - protein, 9 aa, Artificial Sequence
  Synthetic: Vk12 CDR3
MQYIEAPLT

SEQ ID NO: 1163 - protein, 112 aa, Artificial Sequence
  Synthetic: Vk12
DIVMTQSPLSLPVTPGEPASISCTSSRSLLHSDGKTYVYWYLQKPGQSPQLLIYELSNRFSGVPDRFSGSGSGTDFTLKISRVEAEDVGVYYCMQYIEAPLTFGGGTKVEIK

SEQ ID NO: 1164 - protein, 16 aa, Artificial Sequence
  Synthetic: Vk13 CDR1
TSSRSLLHSDGKTYVY

SEQ ID NO: 1165 - protein, 7 aa, Artificial Sequence
  Synthetic: Vk13 CDR2
ELSNRFS

SEQ ID NO: 1166 - protein, 9 aa, Artificial Sequence
  Synthetic: Vk13 CDR3
MQYIEAPLT

SEQ ID NO: 1167 - protein, 112 aa, Artificial Sequence
  Synthetic: Vk13
DVVMTQSPLSLPVTLGQPASISCTSSRSLLHSDGKTYVYWFQQRPGQSPRRLIYELSNRFSGVPDRFSGSGSGTDFTLKISRVEAEDVGVYYCMQYIEAPLTFGGGTKVEIK

SEQ ID NO: 1168 - protein, 329 aa, Artificial Sequence
  Synthetic: human IgG1 constant region
ASTKGPSVFPLAPSSKSTSGGTAALGCLVKDYFPEPVTVSWNSGALTSGVHTFPAVLQSSGLYSLSSVVTVPSSSLGTQTYICNVNHKPSNTKVDKKVEPKSCDKTHTCPPCPAPELLGGPSVFLFPPKPKDTLMISRTPEVTCVVVDVSHEDPEVKFNWYVDGVEVHNAKTKPREEQYNSTYRVVSVLTVLHQDWLNGKEYKCKVSNKALPAPIEKTISKAKGQPREPQVYTLPPSRDELTKNQVSLTCLVKGFYPSDIAVEWESNGQPENNYKTTPPVLDSDGSFFLYSKLTVDKSRWQQGNVFSCSVMHEALHNHYTQKSLSLSPG

SEQ ID NO: 1169 - protein, 325 aa, Artificial Sequence
  Synthetic: human IgG2 constant region
ASTKGPSVFPLAPCSRSTSESTAALGCLVKDYFPEPVTVSWNSGALTSGVHTFPAVLQSSGLYSLSSVVTVPSSNFGTQTYTCNVDHKPSNTKVDKTVERKCCVECPPCPAPPVAGPSVFLFPPKPKDTLMISRTPEVTCVVVDVSHEDPEVQFNWYVDGVEVHNAKTKPREEQFNSTFRVVSVLTVVHQDWLNGKEYKCKVSNKGLPAPIEKTISKTKGQPREPQVYTLPPSREEMTKNQVSLTCLVKGFYPSDIAVEWESNGQPENNYKTTPPMLDSDGSFFLYSKLTVDKSRWQQGNVFSCSVMHEALHNHYTQKSLSLSPG

SEQ ID NO: 1170 - protein, 376 aa, Artificial Sequence
  Synthetic: human IgG3 constant region
ASTKGPSVFPLAPCSRSTSGGTAALGCLVKDYFPEPVTVSWNSGALTSGVHTFPAVLQSSGLYSLSSVVTVPSSSLGTQTYTCNVNHKPSNTKVDKRVELKTPLGDTTHTCPRCPEPKSCDTPPPCPRCPEPKSCDTPPPCPRCPEPKSCDTPPPCPRCPAPELLGGPSVFLFPPKPKDTLMISRTPEVTCVVVDVSHEDPEVQFKWYVDGVEVHNAKTKPREEQYNSTFRVVSVLTVLHQDWLNGKEYKCKVSNKALPAPIEKTISKTKGQPREPQVYTLPPSREEMTKNQVSLTCLVKGFYPSDIAVEWESSGQPENNYNTTPPMLDSDGSFFLYSKLTVDKSRWQQGNIFSCSVMHEALHNRFTQKSLSLSPG

SEQ ID NO: 1171 - protein, 326 aa, Artificial Sequence
  Synthetic: human IgG4 constant region
ASTKGPSVFPLAPCSRSTSESTAALGCLVKDYFPEPVTVSWNSGALTSGVHTFPAVLQSSGLYSLSSVVTVPSSSLGTKTYTCNVDHKPSNTKVDKRVESKYGPPCPSCPAPEFLGGPSVFLFPPKPKDTLMISRTPEVTCVVVDVSQEDPEVQFNWYVDGVEVHNAKTKPREEQFNSTYRVVSVLTVLHQDWLNGKEYKCKVSNKGLPSSIEKTISKAKGQPREPQVYTLPPSQEEMTKNQVSLTCLVKGFYPSDIAVEWESNGQPENNYKTTPPVLDSDGSFFLYSRLTVDKSRWQEGNVFSCSVMHEALHNHYTQKSLSLSLG

SEQ ID NO: 1172 - protein, 325 aa, Artificial Sequence
  Synthetic: M5
ASTKGPSVFPLAPSSRSTSESTAALGCLVKDYFPEPVTVSWNSGALTSGVHTFPAVLQSSGLYSLSSVVTVPSSNFGTQTYTCNVDHKPSNTKVDKTVERKCCVECPPCPAPPVAGPSVFLFPPKPKDTLMISRTPEVTCVVVDVSQEDPEVQFNWYVDGVEVHNAKTKPREEQFNSTFRVVSVLTVLHQDWLNGKEYKCKVSNKGLPSSIEKTISKTKGQPREPQVYTLPPSREEMTKNQVSLTCLVKGFYPSDIAVEWESNGQPENNYKTTPPMLDSDGSFFLYSKLTVDKSRWQQGNVFSCSVMHEALHNHYTQKSLSLSPG

SEQ ID NO: 1173 - protein, 325 aa, Artificial Sequence
  Synthetic: IgG2 (C127S) (M7)
ASTKGPSVFPLAPSSRSTSESTAALGCLVKDYFPEPVTVSWNSGALTSGVHTFPAVLQSSGLYSLSSVVTVPSSNFGTQTYTCNVDHKPSNTKVDKTVERKCCVECPPCPAPPVAGPSVFLFPPKPKDTLMISRTPEVTCVVVDVSHEDPEVQFNWYVDGVEVHNAKTKPREEQFNSTFRVVSVLTVVHQDWLNGKEYKCKVSNKGLPAPIEKTISKTKGQPREPQVYTLPPSREEMTKNQVSLTCLVKGFYPSDIAVEWESNGQPENNYKTTPPMLDSDGSFFLYSKLTVDKSRWQQGNVFSCSVMHEALHNHYTQKSLSLSPG

SEQ ID NO: 1174 - protein, 329 aa, Artificial Sequence
  Synthetic: IgG1_IgG4 Fc region (M9)
ASTKGPSVFPLAPSSKSTSGGTAALGCLVKDYFPEPVTVSWNSGALTSGVHTFPAVLQSSGLYSLSSVVTVPSSSLGTQTYICNVNHKPSNTKVDKKVEPKSCDKTHTCPSCPAPEAAGGPSVFLFPPKPKDTLMISRTPEVTCVVVDVSQEDPEVQFNWYVDGVEVHNAKTKPREEQFNSTYRVVSVLTVLHQDWLNGKEYKCKVSNKGLPSSIEKTISKAKGQPREPQVYTLPPSREEMTKNQVSLTCLVKGFYPSDIAVEWESNGQPENNYKTTPPVLDSDGSFFLYSKLTVDKSRWQQGNVFSCSVMHEALHNHYTQKSLSLSPG

SEQ ID NO: 1175 - protein, 329 aa, Artificial Sequence
  Synthetic: IgG1 (D265A/N297Q) (M11)
ASTKGPSVFPLAPSSKSTSGGTAALGCLVKDYFPEPVTVSWNSGALTSGVHTFPAVLQSSGLYSLSSVVTVPSSSLGTQTYICNVNHKPSNTKVDKKVEPKSCDKTHTCPPCPAPELLGGPSVFLFPPKPKDTLMISRTPEVTCVVVAVSHEDPEVKFNWYVDGVEVHNAKTKPREEQYQSTYRVVSVLTVLHQDWLNGKEYKCKVSNKALPAPIEKTISKAKGQPREPQVYTLPPSREEMTKNQVSLTCLVKGFYPSDIAVEWESNGQPENNYKTTPPVLDSDGSFFLYSKLTVDKSRWQQGNVFSCSVMHEALHNHYTQKSLSLSPG

SEQ ID NO: 1176 - DNA, 372 bp, Artificial Sequence
  Synthetic: VH Ab16
gaagtgcagctgctggaaagcggcggcggcgtggtgcagccgggccgtagcctgcgtctgagctgcgcggcgagcggctttacctttagcagctatgcgatgcattgggtgcgtcaggcgccgggcaaaggcctggaatgggtggcggtgattagctatgatggcagcaacaaatattatgcggatagcgtgaaaggccgttttaccattagccgtgataacagcaaaaacaccctgagcctgcagatgaacagcctgcgtgtggaagataccgcgatttattattgcgtgcgtggcgcgggccgtggctatacccgtggcccggatggctttgatatttggggccagggcaccatggtgaccgtgagcagc

SEQ ID NO: 1177 - DNA, 372 bp, Artificial Sequence
  Synthetic: VH Ab17
gaagtgcagctgctggaaagcggcggcggcgtggtgcagccgggccgtagcctgcgtctgagctgcgcggcgagcggctttacctttagcagctatgcgatgcattgggtgcgtcaggcgccgggcaaaggcctggaatgggtggcggtgattagctatgatggcagcaacaaatattatgcggatagcgtgaaaggccgttttaccattagccgtgataacagcaaaaacaccctgagcctgcagatgaacagcctgcgtgtggaagataccgcgatttattattgcgtgcgtggcgcgggccgtggctataccaacggcccggatggctttgatatttggggccagggcaccatggtgaccgtgagcagc

SEQ ID NO: 1178 - DNA, 372 bp, Artificial Sequence
  Synthetic: VH Ab18
gaagtgcagctgctggaaagcggcggcggcgtggtgcagccgggccgtagcctgcgtctgagctgcgcggcgagcggctttacctttagcagctatgcgatgcattgggtgcgtcaggcgccgggcaaaggcctggaatgggtggcggtgattagctatgatggcagcaacaaatattatgcggatagcgtgaaaggccgttttaccattagccgtgataacagcaaaaacaccctgagcctgcagatgaacagcctgcgtgtggaagataccgcgatttattattgcgtgcgtggcgcgggccgtggctttacctggggcccggatggctttgatatttggggccagggcaccatggtgaccgtgagcagc

SEQ ID NO: 1179 - DNA, 372 bp, Artificial Sequence
  Synthetic: VH Ab19
gaagtgcagctgctggaaagcggcggcggcgtggtgcagccgggccgtagcctgcgtctgagctgcgcggcgagcggctttacctttagcagctatgcgatgcattgggtgcgtcaggcgccgggcaaaggcctggaatgggtggcggtgattagctatgatggcagcaacaaatattatgcggatagcgtgaaaggccgttttaccattagccgtgataacagcaaaaacaccctgagcctgcagatgaacagcctgcgtgtggaagataccgcgatttattattgcgtgcgtggcgcgggccgtggctttaccctgggcccggatggctttgatatttggggccagggcaccatggtgaccgtgagcagc

SEQ ID NO: 1180 - DNA, 372 bp, Artificial Sequence
  Synthetic: VH Ab20
gaagtgcagctgctggaaagcggcggcggcgtggtgcagccgggccgtagcctgcgtctgagctgcgcggcgagcggctttacctttagcagctatgcgatgcattgggtgcgtcaggcgccgggcaaaggcctggaatgggtggcggtgattagctatgatggcagcaacaaatattatgcggatagcgtgaaaggccgttttaccattagccgtgataacagcaaaaacaccctgagcctgcagatgaacagcctgcgtgtggaagataccgcgatttattattgcgtgcgtggcgcgggccgtggcctgacctttggcccggatggctttgatatttggggccagggcaccatggtgaccgtgagcagc

SEQ ID NO: 1181 - DNA, 372 bp, Artificial Sequence
  Synthetic: VH Ab21
gaagtgcagctgctggaaagcggcggcggcgtggtgcagccgggccgtagcctgcgtctgagctgcgcggcgagcggctttacctttagcagctatgcgatgcattgggtgcgtcaggcgccgggcaaaggcctggaatgggtggcggtgattagctatgatggcagcaacaaatattatgcggatagcgtgaaaggccgttttaccattagccgtgataacagcaaaaacaccctgagcctgcagatgaacagcctgcgtgtggaagataccgcgatttattattgcgtgcgtggcgcgggcctgggctggccgtatggcccggatggctttgatatttggggccagggcaccatggtgaccgtgagcagc

SEQ ID NO: 1182 - DNA, 372 bp, Artificial Sequence
  Synthetic: VH Ab22
gaagtgcagctgctggaaagcggcggcggcgtggtgcagccgggccgtagcctgcgtctgagctgcgcggcgagcggctttacctttagcagctatgcgatgcattgggtgcgtcaggcgccgggcaaaggcctggaatgggtggcggtgattagctatgatggcagcaacaaatattatgcggatagcgtgaaaggccgttttaccattagccgtgataacagcaaaaacaccctgagcctgcagatgaacagcctgcgtgtggaagataccgcgatttattattgcgtgcgtggcgcgggccgtggctttaccaaaggcccggatggctttgatatttggggccagggcaccatggtgaccgtgagcagc

SEQ ID NO: 1183 - DNA, 372 bp, Artificial Sequence
  Synthetic: VH Ab23
gaagtgcagctgctggaaagcggcggcggcgtggtgcagccgggccgtagcctgcgtctgagctgcgcggcgagcggctttacctttagcagctatgcgatgcattgggtgcgtcaggcgccgggcaaaggcctggaatgggtggcggtgattagctatgatggcagcaacaaatattatgcggatagcgtgaaaggccgttttaccattagccgtgataacagcaaaaacaccctgagcctgcagatgaacagcctgcgtgtggaagataccgcgatttattattgcgtgcgtggcgcgggccgtggcctgacctatggcccggatggctttgatatttggggccagggcaccatggtgaccgtgagcagc

SEQ ID NO: 1184 - DNA, 372 bp, Artificial Sequence
  Synthetic: VH Ab24
gaagtgcagctgctggaaagcggcggcggcgtggtgcagccgggccgtagcctgcgtctgagctgcgcggcgagcggctttacctttagcagctatgcgatgcattgggtgcgtcaggcgccgggcaaaggcctggaatgggtggcggtgattagctatgatggcagcaacaaatattatgcggatagcgtgaaaggccgttttaccattagccgtgataacagcaaaaacaccctgagcctgcagatgaacagcctgcgtgtggaagataccgcgatttattattgcgtgcgtggcgcgggccgtggcctgatttatggcccggatggctttgatatttggggccagggcaccatggtgaccgtgagcagc

SEQ ID NO: 1185 - DNA, 372 bp, Artificial Sequence
  Synthetic: VH Ab25
gaagtgcagctgctggaaagcggcggcggcgtggtgcagccgggccgtagcctgcgtctgagctgcgcggcgagcggctttacctttagcagctatgcgatgcattgggtgcgtcaggcgccgggcaaaggcctggaatgggtggcggtgattagctatgatggcagcaacaaatattatgcggatagcgtgaaaggccgttttaccattagccgtgataacagcaaaaacaccctgagcctgcagatgaacagcctgcgtgtggaagataccgcgatttattattgcgtgcgtggcgcgggcctgggctttacctatggcccggatggctttgatatttggggccagggcaccatggtgaccgtgagcagc

SEQ ID NO: 1186 - DNA, 372 bp, Artificial Sequence
  Synthetic: VH Ab26
gaagtgcagctgctggaaagcggcggcggcgtggtgcagccgggccgtagcctgcgtctgagctgcgcggcgagcggctttacctttagcagctatgcgatgcattgggtgcgtcaggcgccgggcaaaggcctggaatgggtggcggtgattagctatgatggcagcaacaaatattatgcggatagcgtgaaaggccgttttaccattagccgtgataacagcaaaaacaccctgagcctgcagatgaacagcctgcgtgtggaagataccgcgatttattattgcgtgcgtggcgcgggccagggcctgagctatggcccggatggctttgatatttggggccagggcaccatggtgaccgtgagcagc

SEQ ID NO: 1187 - DNA, 372 bp, Artificial Sequence
  Synthetic: VH Ab27
gaagtgcagctgctggaaagcggcggcggcgtggtgcagccgggccgtagcctgcgtctgagctgcgcggcgagcggctttacctttagcagctatgcgatgcattgggtgcgtcaggcgccgggcaaaggcctggaatgggtggcggtgattagctatgatggcagcaacaaatattatgcggatagcgtgaaaggccgttttaccattagccgtgataacagcaaaaacaccctgagcctgcagatgaacagcctgcgtgtggaagataccgcgatttattattgcgtgcgtggcgcgggccgtggctataccctgggcccggatggctttgatatttggggccagggcaccatggtgaccgtgagcagc

SEQ ID NO: 1188 - DNA, 378 bp, Artificial Sequence
  Synthetic: VH Ab28
  misc_feature (373)..(378): n is a, c, g, or t
gaagtgcagctgctggaaagcggcggcggcgtggtgcagccgggccgtagcctgcgtctgagctgcgcggcgagcggctttacctttagcagctatgcgatgcattgggtgcgtcaggcgccgggcaaaggcctggaatgggtggcggtgattagctatgatggcagcaacaaatattatgcggatagcgtgaaaggccgttttaccattagccgtgataacagcaaaaacaccctgagcctgcagatgaacagcctgcgtgtggaagataccgcgatttattattgcgtgcgtggcgcgggccgtggctttacctatggcccggatggctttgatatttggggccagggcaccatggtgaccgtgagcagcnnnnnn

SEQ ID NO: 1189 - DNA, 372 bp, Artificial Sequence; identical to SEQ ID NO: 1181
  Synthetic: VH Ab29

SEQ ID NO: 1190 - DNA, 372 bp, Artificial Sequence
  Synthetic: VH Ab30
  misc_feature (265)..(267): n is a, c, g, or t
  misc_feature (271)..(276): n is a, c, g, or t
gaagtgcagctgctggaaagcggcggcggcgtggtgcagccgggccgtagcctgcgtctgagctgcgcggcgagcggctttacctttagcagctatgcgatgcattgggtgcgtcaggcgccgggcaaaggcctggaatgggtggcggtgattagctatgatggcagcaacaaatattatgcggatagcgtgaaaggccgttttaccattagccgtgataacagcaaaaacaccctgagcctgcagatgaacagcctgcgtgtgnnnaaannnnnnatttattattgcgtgcgtggcgcgggccgtggctttacctggggcccggatggctttgatatttggggccagggcaccatggtgaccgtgagcagc

SEQ ID NO: 1191 - DNA, 372 bp, Artificial Sequence; identical to SEQ ID NO: 1183
  Synthetic: VH Ab31

SEQ ID NO: 1192 - DNA, 372 bp, Artificial Sequence; identical to SEQ ID NO: 1185
  Synthetic: VH Ab32

SEQ ID NO: 1193 - DNA, 372 bp, Artificial Sequence; identical to SEQ ID NO: 1186
  Synthetic: VH Ab33

SEQ ID NO: 1194 - DNA, 372 bp, Artificial Sequence; identical to SEQ ID NO: 1176
  Synthetic: VH Ab34

SEQ ID NO: 1195 - DNA, 372 bp, Artificial Sequence; identical to SEQ ID NO: 1177
  Synthetic: VH Ab35

SEQ ID NO: 1196 - DNA, 372 bp, Artificial Sequence
  Synthetic: VH Ab36
gaagtgcagctgctggaaagcggcggcggcgtggtgcagccgggccgtagcctgcgtctgagctgcgcggcgagcggctttacctttagcagctatgcgatgcattgggtgcgtcaggcgccgggcaaaggcctggaatgggtggcggtgattagctatgatggcagcaacaaatattatgcggatagcgtgaaaggccgttttaccattagccgtgataacagcaaaaacaccctgagcctgcagatgaacagcctgcgtgtggaagataccgcgatttattattgcgtgcgtggcgcgggccgtggctttacctatggcccggatggctttgatatttggggccagggcaccatggtgaccgtgagcagc

SEQ ID NO: 1197 - DNA, 372 bp, Artificial Sequence; identical to SEQ ID NO: 1183
  Synthetic: VH Ab37

SEQ ID NO: 1198 - DNA, 372 bp, Artificial Sequence
  Synthetic: VH Ab38
gaagtgcagctgctggaaagcggcggcggcgtggtgcagccgggccgtagcctgcgtctgagctgcgcggcgagcggctttacctttagcagctatgcgatgcattgggtgcgtcaggcgccgggcaaaggcctggaatgggtggcggtgattagctatgatggcagcaacaaatattatgcggatagcgtgaaaggccgttttaccattagccgtgataacagcaaaaacaccctgagcctgcagatgaacagcctgcgtgtggaagataccgcgatttattattgcgtgcgtggcgcgggccagggctatccgtatggcccggatggctttgatatttggggccagggcaccatggtgaccgtgagcagc

SEQ ID NO: 1199 - DNA, 372 bp, Artificial Sequence
  Synthetic: VH Ab39
gaagtgcagctgctggaaagcggcggcggcgtggtgcagccgggccgtagcctgcgtctgagctgcgcggcgagcggctttacctttagcagctatgcgatgcattgggtgcgtcaggcgccgggcaaaggcctggaatgggtggcggtgattagctatgatggcagcaacaaatattatgcggatagcgtgaaaggccgttttaccattagccgtgataacagcaaaaacaccctgagcctgcagatgaacagcctgcgtgtggaagataccgcgatttattattgcgtgcgtggcgcgggcaccggctttacctatggcccggatggctttgatatttggggccagggcaccatggtgaccgtgagcagc

SEQ ID NO: 1200 - DNA, 372 bp, Artificial Sequence
  Synthetic: VH Ab40
gaagtgcagctgctggaaagcggcggcggcgtggtgcagccgggccgtagcctgcgtctgagctgcgcggcgagcggctttacctttagcagctatgcgatgcattgggtgcgtcaggcgccgggcaaaggcctggaatgggtggcggtgattagctatgatggcagcaacaaatattatgcggatagcgtgaaaggccgttttaccattagccgtgataacagcaaaaacaccctgagcctgcagatgaacagcctgcgtgtggaagataccgcgatttattattgcgtgcgtggcgcgggcatgggcctgacctatggcccggatggctttgatatttggggccagggcaccatggtgaccgtgagcagc

SEQ ID NO: 1201 - DNA, 372 bp, Artificial Sequence
  Synthetic: VH Ab41
gaagtgcagctgctggaaagcggcggcggcgtggtgcagccgggccgtagcctgcgtctgagctgcgcggcgagcggctttacctttagcagctatgcgatgcattgggtgcgtcaggcgccgggcaaaggcctggaatgggtggcggtgattagctatgatggcagcaacaaatattatgcggatagcgtgaaaggccgttttaccattagccgtgataacagcaaaaacaccctgagcctgcagatgaacagcctgcgtgtggaagataccgcgatttattattgcgtgcgtggcgcgggcctgggctttccgtatggcccggatggctttgatatttggggccagggcaccatggtgaccgtgagcagc

SEQ ID NO: 1202 - DNA, 372 bp, Artificial Sequence
  Synthetic: VH Ab42
gaagtgcagctgctggaaagcggcggcggcgtggtgcagccgggccgtagcctgcgtctgagctgcgcggcgagcggctttacctttagcagctatgcgatgcattgggtgcgtcaggcgccgggcaaaggcctggaatgggtggcggtgattagctatgatggcagcaacaaatattatgcggatagcgtgaaaggccgttttaccattagccgtgataacagcaaaaacaccctgagcctgcagatgaacagcctgcgtgtggaagataccgcgatttattattgcgtgcgtggcgcgggcctgggctgggcgtatggcccggatggctttgatatttggggccagggcaccatggtgaccgtgagcagc

SEQ ID NO: 1203 - DNA, 372 bp, Artificial Sequence
  Synthetic: VH Ab43
gaagtgcagctgctggaaagcggcggcggcgtggtgcagccgggccgtagcctgcgtctgagctgcgcggcgagcggctttacctttagcagctatgcgatgcattgggtgcgtcaggcgccgggcaaaggcctggaatgggtggcggtgattagctatgatggcagcaacaaatattatgcggatagcgtgaaaggccgttttaccattagccgtgataacagcaaaaacaccctgagcctgcagatgaacagcctgcgtgtggaagataccgcgatttattattgcgtgcgtggcgcgggccgtggctatccgtatggcccggatggctttgatatttggggccagggcaccatggtgaccgtgagcagc

SEQ ID NO: 1204 - DNA, 372 bp, Artificial Sequence
  Synthetic: VH Ab44
gaagtgcagctgctggaaagcggcggcggcgtggtgcagccgggccgtagcctgcgtctgagctgcgcggcgagcggctttgattttgcgggctatgcgatgcattgggtgcgtcaggcgccgggcaaaggcctggaatgggtggcggtgattagctatgatggcagcaacaaatattatgcggatagcgtgaaaggccgttttaccattagccgtgataacagcaaaaacaccctgagcctgcagatgaacagcctgcgtgtggaagataccgcgatttattattgcgtgcgtggcgcgggccgtggcctgacctatggcccggatggctttgatatttggggccagggcaccatggtgaccgtgagcagc

SEQ ID NO: 1205 - DNA, 372 bp, Artificial Sequence
  Synthetic: VH Ab45
gaagtgcagctgctggaaagcggcggcggcgtggtgcagccgggccgtagcctgcgtctgagctgcgcggcgagcggctttacctttagcagctatgcgatgcattgggtgcgtcaggcgccgggcaaaggcctggaatgggtggcggtgattagctatgatggcagcaacaaatattatgcggatagcgtgaaaggccgttttaccattagccgtgataacagcaaaaacaccctgagcctgcagatgaacagcctgcgtgtggaagataccgcgatttattattgcgtgcgtggcgcgggcctgggcctgacctatggcccggatggctttgatatttggggccagggcaccatggtgaccgtgagcagc

SEQ ID NO: 1206 - DNA, 372 bp, Artificial Sequence
  Synthetic: VH Ab46
gaagtgcagctgctggaaagcggcggcggcgtggtgcagccgggccgtagcctgcgtctgagctgcgcggcgagcggctttacctttagcagctatgcgatgcattgggtgcgtcaggcgccgggcaaaggcctggaatgggtggcggtgattagctatgatggcagcaacaaatattatgcggatagcgtgaaaggccgttttaccattagccgtgataacagcaaaaacaccctgagcctgcagatgaacagcctgcgtgtggaagataccgcgatttattattgcgtgcgtggcgcgggcctgggctatccgtatggcccggatggctttgatatttggggccagggcaccatggtgaccgtgagcagc

SEQ ID NO: 1207 - DNA, 372 bp, Artificial Sequence
  Synthetic: VH Ab47
gaagtgcagctgctggaaagcggcggcggcgtggtgcagccgggccgtagcctgcgtctgagctgcgcggcgagcggctttacctttagcagctatgcgatgcattgggtgcgtcaggcgccgggcaaaggcctggaatgggtggcggtgattagctatgatggcagcaacaaatattatgcggatagcgtgaaaggccgttttaccattagccgtgataacagcaaaaacaccctgagcctgcagatgaacagcctgcgtgtggaagataccgcgatttattattgcgtgcgtggcgcgggccgtggctatccgcatggcccggatggctttgatatttggggccagggcaccatggtgaccgtgagcagc

SEQ ID NO: 1208 - DNA, 372 bp, Artificial Sequence
  Synthetic: VH Ab48
gaagtgcagctgctggaaagcggcggcggcgtggtgcagccgggccgtagcctgcgtctgagctgcgcggcgagcggctttacctttagcagctatgcgatgcattgggtgcgtcaggcgccgggcaaaggcctggaatgggtggcggtgattagctatgatggcagcaacaaatattatgcggatagcgtgaaaggccgttttaccattagccgtgataacagcaaaaacaccctgagcctgcagatgaacagcctgcgtgtggaagataccgcgatttattattgcgtgcgtggcgcgggcattggctatccgcatggcccggatggctttgatatttggggccagggcaccatggtgaccgtgagcagc

SEQ ID NO: 1209 - DNA, 372 bp, Artificial Sequence; identical to SEQ ID NO: 1203
  Synthetic: VH Ab49

SEQ ID NO: 1210 - DNA, 372 bp, Artificial Sequence
  Synthetic: VH Ab50
gaagtgcagctgctggaaagcggcggcggcgtggtgcagccgggccgtagcctgcgtctgagctgcgcggcgagcggctttacctttagcagctatgcgatgcattgggtgcgtcaggcgccgggcaaaggcctggaatgggtggcggtgattagctatgatggcagcaacaaatattatgcggatagcgtgaaaggccgttttaccattagccgtgataacagcaaaaacaccctgagcctgcagatgaacagcctgcgtgtggaagataccgcgatttattattgcgtgcgtggcgcgggcctgggctttccgtttggcccggatggctttgatatttggggccagggcaccatggtgaccgtgagcagc

SEQ ID NO: 1211 - DNA, 372 bp, Artificial Sequence
  Synthetic: VH Ab51
gaagtgcagctgctggaaagcggcggcggcgtggtgcagccgggccgtagcctgcgtctgagctgcgcggcgagcggctttacctttagcagctatgcgatgcattgggtgcgtcaggcgccgggcaaaggcctggaatgggtggcggtgattagctatgatggcagcaacaaatattatgcggatagcgtgaaaggccgttttaccattagccgtgataacagcaaaaacaccctgagcctgcagatgaacagcctgcgtgtggaagataccgcgatttattattgcgtgcgtggcgcgggccgtggctttccgtatggcccggatggctttgatatttggggccagggcaccatggtgaccgtgagcagc

SEQ ID NO: 1212 - DNA, 372 bp, Artificial Sequence
  Synthetic: VH Ab52
gaagtgcagctgctggaaagcggcggcggcgtggtgcagccgggccgtagcctgcgtctgagctgcgcggcgagcggctttacctttagcagctatgcgatgcattgggtgcgtcaggcgccgggcaaaggcctggaatgggtggcggtgattagctatgatggcagcaacaaatattatgcggatagcgtgaaaggccgttttaccattagccgtgataacagcaaaaacaccctgagcctgcagatgaacagcctgcgtgtggaagataccgcgatttattattgcgtgcgtggcgcgggcctgggctatccgaacggcccggatggctttgatatttggggccagggcaccatggtgaccgtgagcagc

SEQ ID NO: 1213 - DNA, 372 bp, Artificial Sequence
  Synthetic: VH Ab53
gaagtgcagctgctggaaagcggcggcggcgtggtgcagccgggccgtagcctgcgtctgagctgcgcggcgagcggctttacctttagcagctatgcgatgcattgggtgcgtcaggcgccgggcaaaggcctggaatgggtggcggtgattagctatgatggcagcaacaaatattatgcggatagcgtgaaaggccgttttaccattagccgtgataacagcaaaaacaccctgagcctgcagatgaacagcctgcgtgtggaagataccgcgatttattattgcgtgcgtggcgcgggccagggctttccgtatggcccggatggctttgatatttggggccagggcaccatggtgaccgtgagcagc

SEQ ID NO: 1214 - DNA, 372 bp, Artificial Sequence; identical to SEQ ID NO: 1198
  Synthetic: VH Ab54

SEQ ID NO: 1215 - DNA, 372 bp, Artificial Sequence; identical to SEQ ID NO: 1199
  Synthetic: VH Ab55

SEQ ID NO: 1216 - DNA, 372 bp, Artificial Sequence; identical to SEQ ID NO: 1200
  Synthetic: VH Ab56

SEQ ID NO: 1217 - DNA, 372 bp, Artificial Sequence; identical to SEQ ID NO: 1201
  Synthetic: VH Ab57

SEQ ID NO: 1218 - DNA, 372 bp, Artificial Sequence; identical to SEQ ID NO: 1202
  Synthetic: VH Ab58

SEQ ID NO: 1219 - DNA, 372 bp, Artificial Sequence; identical to SEQ ID NO: 1203
  Synthetic: VH Ab59

SEQ ID NO: 1220 - DNA, 372 bp, Artificial Sequence; identical to SEQ ID NO: 1204
  Synthetic: VH Ab60

SEQ ID NO: 1221 - DNA, 372 bp, Artificial Sequence; identical to SEQ ID NO: 1205
  Synthetic: VH Ab61

SEQ ID NO: 1222 - DNA, 372 bp, Artificial Sequence; identical to SEQ ID NO: 1206
  Synthetic: VH Ab62

SEQ ID NO: 1223 - DNA, 372 bp, Artificial Sequence; identical to SEQ ID NO: 1207
  Synthetic: VH Ab63

SEQ ID NO: 1224 - DNA, 372 bp, Artificial Sequence; identical to SEQ ID NO: 1208
  Synthetic: VH Ab64

SEQ ID NO: 1225 - DNA, 372 bp, Artificial Sequence; identical to SEQ ID NO: 1203
  Synthetic: VH Ab65

SEQ ID NO: 1226 - DNA, 372 bp, Artificial Sequence; identical to SEQ ID NO: 1210
  Synthetic: VH Ab66

SEQ ID NO: 1227 - DNA, 372 bp, Artificial Sequence; identical to SEQ ID NO: 1211
  Synthetic: VH Ab67

SEQ ID NO: 1228 - DNA, 372 bp, Artificial Sequence; identical to SEQ ID NO: 1212
  Synthetic: VH Ab68

SEQ ID NO: 1229 - DNA, 372 bp, Artificial Sequence; identical to SEQ ID NO: 1213
  Synthetic: VH Ab69

SEQ ID NO: 1230 - DNA, 372 bp, Artificial Sequence; identical to SEQ ID NO: 1198
  Synthetic: VH Ab70

SEQ ID NO: 1231 - DNA, 372 bp, Artificial Sequence; identical to SEQ ID NO: 1199
  Synthetic: VH Ab71

SEQ ID NO: 1232 - DNA, 372 bp, Artificial Sequence; identical to SEQ ID NO: 1200
  Synthetic: VH Ab72

SEQ ID NO: 1233 - DNA, 372 bp, Artificial Sequence; identical to SEQ ID NO: 1201
  Synthetic: VH Ab73

SEQ ID NO: 1234 - DNA, 372 bp, Artificial Sequence; identical to SEQ ID NO: 1202
  Synthetic: VH Ab74

SEQ ID NO: 1235 - DNA, 372 bp, Artificial Sequence; identical to SEQ ID NO: 1203
  Synthetic: VH Ab75

SEQ ID NO: 1236 - DNA, 372 bp, Artificial Sequence; identical to SEQ ID NO: 1204
  Synthetic: VH Ab76

SEQ ID NO: 1237 - DNA, 372 bp, Artificial Sequence; identical to SEQ ID NO: 1205
  Synthetic: VH Ab77

SEQ ID NO: 1238 - DNA, 372 bp, Artificial Sequence; identical to SEQ ID NO: 1206
  Synthetic: VH Ab78

SEQ ID NO: 1239 - DNA, 372 bp, Artificial Sequence; identical to SEQ ID NO: 1207
  Synthetic: VH Ab79

SEQ ID NO: 1240 - DNA, 372 bp, Artificial Sequence; identical to SEQ ID NO: 1208
  Synthetic: VH Ab80

SEQ ID NO: 1241 - DNA, 372 bp, Artificial Sequence; identical to SEQ ID NO: 1203
  Synthetic: VH Ab81

SEQ ID NO: 1242 - DNA, 372 bp, Artificial Sequence; identical to SEQ ID NO: 1210
  Synthetic: VH Ab82

SEQ ID NO: 1243 - DNA, 372 bp, Artificial Sequence; identical to SEQ ID NO: 1211
  Synthetic: VH Ab83

SEQ ID NO: 1244 - DNA, 372 bp, Artificial Sequence; identical to SEQ ID NO: 1212
  Synthetic: VH Ab84

SEQ ID NO: 1245 - DNA, 372 bp, Artificial Sequence; identical to SEQ ID NO: 1213
  Synthetic: VH Ab85

SEQ ID NO: 1246 - DNA, 372 bp, Artificial Sequence; identical to SEQ ID NO: 1183
  Synthetic: VH Ab86

SEQ ID NO: 1247 - DNA, 372 bp, Artificial Sequence; identical to SEQ ID NO: 1178
  Synthetic: VH Ab87

SEQ ID NO: 1248 - DNA, 372 bp, Artificial Sequence; identical to SEQ ID NO: 1183
  Synthetic: VH Ab88

SEQ ID NO: 1249 - DNA, 372 bp, Artificial Sequence; identical to SEQ ID NO: 1211
  Synthetic: VH Ab89

SEQ ID NO: 1250 - DNA, 372 bp, Artificial Sequence; identical to SEQ ID NO: 1203
  Synthetic: VH Ab90

SEQ ID NO: 1251 - DNA, 372 bp, Artificial Sequence
  Synthetic: VH Ab91
gaagtgcagctgctggaaagcggcggcggcgtggtgcagccgggccgtagcctgcgtctgagctgcgcggcgagcggctttacctttagcagctatgcgatgcattgggtgcgtcaggcgccgggcaaaggcctggaatgggtggcggtgattagctatgatggcagcaacaaatattatgcggatagcgtgaaaggccgttttaccattagccgtgataacagcaaaaacaccctgagcctgcagatgaacagcctgcgtgtggaagataccgcgatttattattgcgtgcgtggcgcgggccagggctatatgcatggcccggatggctttgatatttggggccagggcaccatggtgaccgtgagcagc

SEQ ID NO: 1252 - DNA, 372 bp, Artificial Sequence
  Synthetic: VH Ab92
gaagtgcagctgctggaaagcggcggcggcgtggtgcagccgggccgtagcctgcgtctgagctgcgcggcgagcggctttacctttagcagctatgcgatgcattgggtgcgtcaggcgccgggcaaaggcctggaatgggtggcggtgattagctatgatggcagcaacaaatattatgcggatagcgtgaaaggccgttttaccattagccgtgataacagcaaaaacaccctgagcctgcagatgaacagcctgcgtgtggaagataccgcgatttattattgcgtgcgtggcgcgggccatggctttccgaccggcccggatggctttgatatttggggccagggcaccatggtgaccgtgagcagc

SEQ ID NO: 1253 - DNA, 372 bp, Artificial Sequence; identical to SEQ ID NO: 1201
  Synthetic: VH Ab93

SEQ ID NO: 1254 - DNA, 372 bp, Artificial Sequence; identical to SEQ ID NO: 1181
  Synthetic: VH Ab94

SEQ ID NO: 1255 - DNA, 372 bp, Artificial Sequence; identical to SEQ ID NO: 1181
  Synthetic: VH Ab95

SEQ ID NO: 1256 - DNA, 372 bp, Artificial Sequence; identical to SEQ ID NO: 1181
  Synthetic: VH Ab96

SEQ ID NO: 1257 - DNA, 372 bp, Artificial Sequence; identical to SEQ ID NO: 1181
  Synthetic: VH Ab97

SEQ ID NO: 1258 - DNA, 372 bp, Artificial Sequence; identical to SEQ ID NO: 1181
  Synthetic: VH Ab98

SEQ ID NO: 1259 - DNA, 372 bp, Artificial Sequence; identical to SEQ ID NO: 1181
  Synthetic: VH Ab99

SEQ ID NO: 1260 - DNA, 372 bp, Artificial Sequence; identical to SEQ ID NO: 1181
  Synthetic: VH Ab100

SEQ ID NO: 1261 - DNA, 372 bp, Artificial Sequence; identical to SEQ ID NO: 1179
  Synthetic: VH Ab101

SEQ ID NO: 1262 - DNA, 372 bp, Artificial Sequence; identical to SEQ ID NO: 1179
  Synthetic: VH Ab102

SEQ ID NO: 1263 - DNA, 372 bp, Artificial Sequence; identical to SEQ ID NO: 1179
  Synthetic: VH Ab103

SEQ ID NO: 1264 - DNA, 372 bp, Artificial Sequence; identical to SEQ ID NO: 1179
  Synthetic: VH Ab104

SEQ ID NO: 1265 - DNA, 372 bp, Artificial Sequence; identical to SEQ ID NO: 1179
  Synthetic: VH Ab105

SEQ ID NO: 1266 - DNA, 372 bp, Artificial Sequence; identical to SEQ ID NO: 1179
  Synthetic: VH Ab106

SEQ ID NO: 1267 - DNA, 372 bp, Artificial Sequence; identical to SEQ ID NO: 1179
  Synthetic: VH Ab107

SEQ ID NO: 1268 - DNA, 336 bp, Artificial Sequence
  Synthetic: VL Ab16
gatattgtgatgacccagaccccgctgagcctgagcgtgaccccgggccagccggcgagcattagctgcaaaagcagccgtagcctgctgcatagcgatggcaaaacctatgtgtattggtatgtgcagaaaagcggccagccgccgcagctgctgatttatgaactgagcaaccgttttagcggcgtgccggatcgttttagcggcagcggcagccgtaccgattttaccctgaaaattagccgtgtggaagcggaagatgtgggcgtgtattattgcatgcagtatattgaagcgccgctgacctttggcggcggcaccaaagtggaaattaaa

SEQ ID NO: 1269 - DNA, 336 bp, Artificial Sequence; identical to SEQ ID NO: 1268
  Synthetic: VL Ab17

SEQ ID NO: 1270 - DNA, 336 bp, Artificial Sequence; identical to SEQ ID NO: 1268
  Synthetic: VL Ab18

SEQ ID NO: 1271 - DNA, 336 bp, Artificial Sequence; identical to SEQ ID NO: 1268
  Synthetic: VL Ab19

SEQ ID NO: 1272 - DNA, 336 bp, Artificial Sequence; identical to SEQ ID NO: 1268
  Synthetic: VL Ab20

SEQ ID NO: 1273 - DNA, 336 bp, Artificial Sequence; identical to SEQ ID NO: 1268
  Synthetic: VL Ab21

SEQ ID NO: 1274 - DNA, 336 bp, Artificial Sequence; identical to SEQ ID NO: 1268
  Synthetic: VL Ab22

SEQ ID NO: 1275 - DNA, 336 bp, Artificial Sequence; identical to SEQ ID NO: 1268
  Synthetic: VL Ab23

SEQ ID NO: 1276 - DNA, 336 bp, Artificial Sequence; identical to SEQ ID NO: 1268
  Synthetic: VL Ab24

SEQ ID NO: 1277 - DNA, 336 bp, Artificial Sequence; identical to SEQ ID NO: 1268
  Synthetic: VL Ab25

SEQ ID NO: 1278 - DNA, 336 bp, Artificial Sequence; identical to SEQ ID NO: 1268
  Synthetic: VL Ab26

SEQ ID NO: 1279 - DNA, 336 bp, Artificial Sequence; identical to SEQ ID NO: 1268
  Synthetic: VL Ab27

SEQ ID NO: 1280 - DNA, 336 bp, Artificial Sequence; identical to SEQ ID NO: 1268
  Synthetic: VL Ab28

SEQ ID NO: 1281 - DNA, 336 bp, Artificial Sequence
  Synthetic: VL Ab29
gatattgtgatgacccagaccccgctgagcctgagcgtgaccccgggccagccggcgagcattagctgcaccagcagccgtagcctgctgcatagcgatggcaaaacctatgtgtattggtatgtgcagaaaagcggccagccgccgcagctgctgatttatgaactgagcaaccgttttagcggcgtgccggatcgttttagcggcagcggcagccgtaccgattttaccctgaaaattagccgtgtggaagcggaagatgtgggcgtgtattattgcatgcagtatgtggaagcgccgctgacctttggcggcggcaccaaagtggaaattaaa

SEQ ID NO: 1282 - DNA, 336 bp, Artificial Sequence; identical to SEQ ID NO: 1281
  Synthetic: VL Ab30

SEQ ID NO: 1283 - DNA, 336 bp, Artificial Sequence; identical to SEQ ID NO: 1281
  Synthetic: VL Ab31

SEQ ID NO: 1284 - DNA, 336 bp, Artificial Sequence; identical to SEQ ID NO: 1281
  Synthetic: VL Ab32

SEQ ID NO: 1285 - DNA, 336 bp, Artificial Sequence; identical to SEQ ID NO: 1281
  Synthetic: VL Ab33

SEQ ID NO: 1286 - DNA, 336 bp, Artificial Sequence; identical to SEQ ID NO: 1281
  Synthetic: VL Ab34

SEQ ID NO: 1287 - DNA, 336 bp, Artificial Sequence; identical to SEQ ID NO: 1281
  Synthetic: VL Ab35

SEQ ID NO: 1288 - DNA, 336 bp, Artificial Sequence
  Synthetic: VL Ab36
gatattgtgatgacccagaccccgctgagcctgagcgtgaccccgggccagccggcgagcattagctgccgtagcagccgtagcctgctgcatagcgatggcaaaacctatgtgtattggtatgtgcagaaaagcggccagccgccgcagctgctgatttatgaactgagcaaccgttttagcggcgtgccggatcgttttagcggcagcggcagccgtaccgattttaccctgaaaattagccgtgtggaagcggaagatgtgggcgtgtattattgcatgcagtatattgaagcgccgctgacctttggcggcggcaccaaagtggaaattaaa

SEQ ID NO: 1289 - DNA, 336 bp, Artificial Sequence; identical to SEQ ID NO: 1288
  Synthetic: VL Ab37

SEQ ID NO: 1290 - DNA, 336 bp, Artificial Sequence; identical to SEQ ID NO: 1288
  Synthetic: VL Ab38

SEQ ID NO: 1291 - DNA, 336 bp, Artificial Sequence; identical to SEQ ID NO: 1288
  Synthetic: VL Ab39

SEQ ID NO: 1292 - DNA, 336 bp, Artificial Sequence; identical to SEQ ID NO: 1288
  Synthetic: VL Ab40

SEQ ID NO: 1293 - DNA, 336 bp, Artificial Sequence; identical to SEQ ID NO: 1288
  Synthetic: VL Ab41

SEQ ID NO: 1294 - DNA, 336 bp, Artificial Sequence; identical to SEQ ID NO: 1288
  Synthetic: VL Ab42

SEQ ID NO: 1295 - DNA, 336 bp, Artificial Sequence; identical to SEQ ID NO: 1288
  Synthetic: VL Ab43

SEQ ID NO: 1296 - DNA, 336 bp, Artificial Sequence; identical to SEQ ID NO: 1288
  Synthetic: VL Ab44

SEQ ID NO: 1297 - DNA, 336 bp, Artificial Sequence; identical to SEQ ID NO: 1288
  Synthetic: VL Ab45

SEQ ID NO: 1298 - DNA, 336 bp, Artificial Sequence; identical to SEQ ID NO: 1288
  Synthetic: VL Ab46

SEQ ID NO: 1299 - DNA, 336 bp, Artificial Sequence; identical to SEQ ID NO: 1288
  Synthetic: VL Ab47

SEQ ID NO: 1300 - DNA, 336 bp, Artificial Sequence; identical to SEQ ID NO: 1288
  Synthetic: VL Ab48

SEQ ID NO: 1301 - DNA, 336 bp, Artificial Sequence; identical to SEQ ID NO: 1288
  Synthetic: VL Ab49

SEQ ID NO: 1302 - DNA, 336 bp, Artificial Sequence; identical to SEQ ID NO: 1288
  Synthetic: VL Ab50

SEQ ID NO: 1303 - DNA, 336 bp, Artificial Sequence; identical to SEQ ID NO: 1288
  Synthetic: VL Ab51

SEQ ID NO: 1304 - DNA, 336 bp, Artificial Sequence; identical to SEQ ID NO: 1288
  Synthetic: VL Ab52

SEQ ID NO: 1305 - DNA, 336 bp, Artificial Sequence; identical to SEQ ID NO: 1288
  Synthetic: VL Ab53

SEQ ID NO: 1306 - DNA, 336 bp, Artificial Sequence
  Synthetic: VL Ab54
gatattgtgatgacccagaccccgctgagcctgagcgtgaccccgggccagccggcgagcattagctgcaccagcagccgtagcctgctgcatagcgatggcaaaacctatgtgtattggtatgtgcagaaaagcggccagccgccgcagctgctgatttatgaactgagcaaccgttttagcggcgtgccggatcgttttagcggcagcggcagccgtaccgattttaccctgaaaattagccgtgtggaagcggaagatgtgggcgtgtattattgcatgcagtatattgaagcgccgctgacctttggcggcggcaccaaagtggaaattaaa

SEQ ID NO: 1307 - DNA, 336 bp, Artificial Sequence; identical to SEQ ID NO: 1306
  Synthetic: VL Ab55

SEQ ID NO: 1308 - DNA, 336 bp, Artificial Sequence; identical to SEQ ID NO: 1306
  Synthetic: VL Ab56

SEQ ID NO: 1309 - DNA, 336 bp, Artificial Sequence; identical to SEQ ID NO: 1306
  Synthetic: VL Ab57

SEQ ID NO: 1310 - DNA, 336 bp, Artificial Sequence; identical to SEQ ID NO: 1306
  Synthetic: VL Ab58

SEQ ID NO: 1311 - DNA, 336 bp, Artificial Sequence; identical to SEQ ID NO: 1306
  Synthetic: VL Ab59

SEQ ID NO: 1312 - DNA, 336 bp, Artificial Sequence; identical to SEQ ID NO: 1306
  Synthetic: VL Ab60

SEQ ID NO: 1313 - DNA, 336 bp, Artificial Sequence; identical to SEQ ID NO: 1306
  Synthetic: VL Ab61

SEQ ID NO: 1314 - DNA, 336 bp, Artificial Sequence; identical to SEQ ID NO: 1306
  Synthetic: VL Ab62

SEQ ID NO: 1315 - DNA, 336 bp, Artificial Sequence; identical to SEQ ID NO: 1306
  Synthetic: VL Ab63

SEQ ID NO: 1316 - DNA, 336 bp, Artificial Sequence; identical to SEQ ID NO: 1306
  Synthetic: VL Ab64

SEQ ID NO: 1317 - DNA, 336 bp, Artificial Sequence; identical to SEQ ID NO: 1306
  Synthetic: VL Ab65

SEQ ID NO: 1318 - DNA, 336 bp, Artificial Sequence; identical to SEQ ID NO: 1306
  Synthetic: VL Ab66

SEQ ID NO: 1319 - DNA, 336 bp, Artificial Sequence; identical to SEQ ID NO: 1306
  Synthetic: VL Ab67

SEQ ID NO: 1320 - DNA, 336 bp, Artificial Sequence; identical to SEQ ID NO: 1306
  Synthetic: VL Ab68

SEQ ID NO: 1321 - DNA, 336 bp, Artificial Sequence; identical to SEQ ID NO: 1306
  Synthetic: VL Ab69

SEQ ID NO: 1322 - DNA, 336 bp, Artificial Sequence; identical to SEQ ID NO: 1268
  Synthetic: VL Ab70

SEQ ID NO: 1323 - DNA, 336 bp, Artificial Sequence; identical to SEQ ID NO: 1268
  Synthetic: VL Ab71

SEQ ID NO: 1324 - DNA, 336 bp, Artificial Sequence; identical to SEQ ID NO: 1268
  Synthetic: VL Ab72

SEQ ID NO: 1325 - DNA, 336 bp, Artificial Sequence; identical to SEQ ID NO: 1268
  Synthetic: VL Ab73

SEQ ID NO: 1326 - DNA, 336 bp, Artificial Sequence; identical to SEQ ID NO: 1268
  Synthetic: VL Ab74

SEQ ID NO: 1327 - DNA, 336 bp, Artificial Sequence; identical to SEQ ID NO: 1268
  Synthetic: VL Ab75

SEQ ID NO: 1328 - DNA, 336 bp, Artificial Sequence; identical to SEQ ID NO: 1268
  Synthetic: VL Ab76

SEQ ID NO: 1329 - DNA, 336 bp, Artificial Sequence; identical to SEQ ID NO: 1268
  Synthetic: VL Ab77

SEQ ID NO: 1330 - DNA, 336 bp, Artificial Sequence; identical to SEQ ID NO: 1268
  Synthetic: VL Ab78

SEQ ID NO: 1331 - DNA, 336 bp, Artificial Sequence; identical to SEQ ID NO: 1268
  Synthetic: VL Ab79

SEQ ID NO: 1332 - DNA, 336 bp, Artificial Sequence; identical to SEQ ID NO: 1268
  Synthetic: VL Ab80

SEQ ID NO: 1333 - DNA, 336 bp, Artificial Sequence; identical to SEQ ID NO: 1268
  Synthetic: VL Ab81

SEQ ID NO: 1334 - DNA, 336 bp, Artificial Sequence; identical to SEQ ID NO: 1268
  Synthetic: VL Ab82

SEQ ID NO: 1335 - DNA, 336 bp, Artificial Sequence; identical to SEQ ID NO: 1268
  Synthetic: VL Ab83

SEQ ID NO: 1336 - DNA, 336 bp, Artificial Sequence; identical to SEQ ID NO: 1268
  Synthetic: VL Ab84

SEQ ID NO: 1337 - DNA, 336 bp, Artificial Sequence; identical to SEQ ID NO: 1268
  Synthetic: VL Ab85

SEQ ID NO: 1338 - DNA, 336 bp, Artificial Sequence
  Synthetic: VL Ab86
gatattgtgatgacccagaccccgctgagcctgagcgtgaccccgggccagccggcgagcattagctgcaaaagcagccgtagcctgctgtggagcgatggcaaaacctatgtgtattggtatgtgcagaaaagcggccagccgccgcagctgctgatttatgaactgagcaaccgttttagcggcgtgccggatcgttttagcggcagcggcagccgtaccgattttaccctgaaaattagccgtgtggaagcggaagatgtgggcgtgtattattgcatgcagtatattgaagcgccgctgacctttggcggcggcaccaaagtggaaattaaa

SEQ ID NO: 1339 - DNA, 336 bp, Artificial Sequence
  Synthetic: VL Ab87
gatattgtgatgacccagaccccgctgagcctgagcgtgaccccgggccagccggcgagcattagctgcaaaagcagccgtagcctgctgcatagcgatggcaaaacctatgtgtattggtatgtgcagaaaagcggccagccgccgcagctgctgatttatgaactgagcaaccgttttagcggcgtgccggatcgttttagcggcagcggcagccgtaccgattttaccctgaaaattagccgtgtggaagcggaagatgtgggcgtgtattattgcatgcagtatgtggaagcgccgctgacctttggcggcggcaccaaagtggaaattaaa

SEQ ID NO: 1340 - DNA, 336 bp, Artificial Sequence
  Synthetic: VL Ab88
gatattgtgatgacccagaccccgctgagcctgagcgtgaccccgggccagccggcgagcattagctgcaaaagcagccgtagcctgctgcatagcgatggcaaaacctatctgtattggtatgtgcagaaaagcggccagccgccgcagctgctgatttatgaactgagcaaccgttttagcggcgtgccggatcgttttagcggcagcggcagccgtaccgattttaccctgaaaattagccgtgtggaagcggaagatgtgggcgtgtattattgcatgcagtatattgaagcgccgctgacctttggcggcggcaccaaagtggaaattaaa

SEQ ID NO: 1341 - DNA, 336 bp, Artificial Sequence
  Synthetic: VL Ab89
gatattgtgatgacccagaccccgctgagcctgagcgtgaccccgggccagccggcgagcattagctgccgtagcagccgtagcctgctgcatagcgatggcaaaacctatgtgtattggtatgtgcagaaaagcggccagccgccgcagctgctgatttatgaactgagcaaccgttttagcggcgtgccggatcgttttagcggcagcggcagccgtaccgattttaccctgaaaattagccgtgtggaagcggaagatgtgggcgtgtattattgcatgcagtatattgaagtgccgctgacctttggcggcggcaccaaagtggaaattaaa

SEQ ID NO: 1342 - DNA, 336 bp, Artificial Sequence
  Synthetic: VL Ab90
gatattgtgatgacccagaccccgctgagcctgagcgtgaccccgggccagccggcgagcattagctgcaccagcagccgtagcctgctgcatagcgatggcaaaacctatgtgtattggtatgtgcagaaaagcggccagccgccgcagctgctgatttatgaactgagcaaccgttttagcggcgtgccggatcgttttagcggcagcggcagccgtaccgattttaccctgaaaattagccgtgtggaagcggaagatgtgggcgtgtattattgcatgcagtatgtggaagtgccgctgacctttggcggcggcaccaaagtggaaattaaa

SEQ ID NO: 1343 - DNA, 336 bp, Artificial Sequence
  Synthetic: VL Ab91
gatattgtgatgacccagaccccgctgagcctgagcgtgaccccgggccagccggcgagcattagctgccgtagcagccgtagcctgctgtggagcgatggcaaaacctatgtgtattggtatgtgcagaaaagcggccagccgccgcagctgctgatttatgaactgagcaaccgttttagcggcgtgccggatcgttttagcggcagcggcagccgtaccgattttaccctgaaaattagccgtgtggaagcggaagatgtgggcgtgtattattgcatgcagtatattgaagcgccgctgacctttggcggcggcaccaaagtggaaattaaa

SEQ ID NO: 1344 - DNA, 336 bp, Artificial Sequence
  Synthetic: VL Ab92
gatattgtgatgacccagaccccgctgagcctgagcgtgaccccgggccagccggcgagcattagctgccgtagcagccgtagcctgctgcatagcgatggcaaaacctatgtgtattggtatgtgcagaaaagcggccagccgccgcagctgctgatttatgaactgagcaaccgttttagcggcgtgccggatcgttttagcggcagcggcagccgtaccgattttaccctgaaaattagccgtgtggaagcggaagatgtgggcgtgtattattgcatgcagtatgtggaagcgccgctgacctttggcggcggcaccaaagtggaaattaaa

SEQ ID NO: 1345 - DNA, 336 bp, Artificial Sequence; identical to SEQ ID NO: 1340
  Synthetic: VL Ab93

SEQ ID NO: 1346 - DNA, 336 bp, Artificial Sequence; identical to SEQ ID NO: 1288
  Synthetic: VL Ab94

SEQ ID NO: 1347 - DNA, 336 bp, Artificial Sequence; identical to SEQ ID NO: 1306
  Synthetic: VL Ab95

SEQ ID NO: 1348 - DNA, 336 bp, Artificial Sequence; identical to SEQ ID NO: 1268
  Synthetic: VL Ab96

SEQ ID NO: 1349 - DNA, 336 bp, Artificial Sequence; identical to SEQ ID NO: 1339
  Synthetic: VL Ab97

SEQ ID NO: 1350 - DNA, 336 bp, Artificial Sequence; identical to SEQ ID NO: 1342
  Synthetic: VL Ab98

SEQ ID NO: 1351 - DNA, 336 bp, Artificial Sequence; identical to SEQ ID NO: 1343
  Synthetic: VL Ab99

SEQ ID NO: 1352 - DNA, 336 bp, Artificial Sequence
  Synthetic: VL Ab100
gatattgtgatgacccagaccccgctgagcctgagcgtgaccccgggccagccggcgagcattagctgcaaaagcagccgtagcctgctgtggagcgatggcaaaacctatgtgtattggtatgtgcagaaaagcggccagccgccgcagctgctgatttatgaactgagcaaccgttttagcggcgtgccggatcgttttagcggcagcggcagccgtaccgattttaccctgaaaattagccgtgtggaagcggaagatgtgggcgtgtattattgcatgcagtatgtggaagcgccgctgacctttggcggcggcaccaaagtggaaattaaa

SEQ ID NO: 1353 - DNA, 336 bp, Artificial Sequence; identical to SEQ ID NO: 1288
  Synthetic: VL Ab101

SEQ ID NO: 1354 - DNA, 336 bp, Artificial Sequence; identical to SEQ ID NO: 1306
  Synthetic: VL Ab102

SEQ ID NO: 1355 - DNA, 336 bp, Artificial Sequence; identical to SEQ ID NO: 1268
  Synthetic: VL Ab103

SEQ ID NO: 1356 - DNA, 336 bp, Artificial Sequence; identical to SEQ ID NO: 1339
  Synthetic: VL Ab104

SEQ ID NO: 1357 - DNA, 336 bp, Artificial Sequence; identical to SEQ ID NO: 1342
  Synthetic: VL Ab105

SEQ ID NO: 1358 - DNA, 336 bp, Artificial Sequence; identical to SEQ ID NO: 1343
  Synthetic: VL Ab106

SEQ ID NO: 1359 - DNA, 336 bp, Artificial Sequence; identical to SEQ ID NO: 1352
  Synthetic: VL Ab107

SEQ ID NO: 1360 - DNA, 1338 bp, Artificial Sequence
  Synthetic: HC Ab16
gaagtgcagctgctggaaagcggcggcggcgtggtgcagccgggccgtagcctgcgtctgagctgcgcggcgagcggctttacctttagcagctatgcgatgcattgggtgcgtcaggcgccgggcaaaggcctggaatgggtggcggtgattagctatgatggcagcaacaaatattatgcggatagcgtgaaaggccgttttaccattagccgtgataacagcaaaaacaccctgagcctgcagatgaacagcctgcgtgtggaagataccgcgatttattattgcgtgcgtggcgcgggccgtggctatacccgtggcccggatggctttgatatttggggccagggcaccatggtgaccgtgagcagcaagggaccctcggtgttccctctcgccccctcatcgaggagcacgtccgaatcgactgcggcgctgggatgtctcgtgaaggactacttccccgagcccgtgaccgtgtcatggaactcaggcgcattgacctcgggagtgcacacgttcccggcagtgttgcagtcgtcgggcctttactcgctgtcgtccgtggtcacggtgccttcgtcgaatttcgggacgcagacttacacatgtaatgtggatcacaaaccgtccaataccaaggtcgataagacggtcgaaaggaaatgctgcgtggaatgtcctccctgcccagcaccgccagtcgcgggtcccagcgtctttttgttcccaccgaagcccaaggacacactgatgatcagccgtacgccggaggtaacatgcgtagtggtagatgtctcgcatgaggaccctgaagtgcagttcaattggtatgtagacggcgtggaggtgcacaacgccaagaccaagccacgagaagaacagttcaactcgacttttagagtggtatccgtcctgaccgtcgtgcaccaggactggctcaatggaaaggagtacaaatgcaaggtatccaacaaggggttgccagctccaatcgaaaagaccatctcaaagacaaaggggcagcccagagagccccaagtgtatacgcttccaccctcaagggaggagatgacaaagaatcaggtatcactcacatgtttggtgaaagggttttatccgagcgatattgcggtcgagtgggaaagcaacggtcaaccggagaacaactataagacgactccccctatgctggacagcgacgggtcgttctttctgtattccaaactcacggtggacaaatcgaggtggcagcaaggaaacgtattctcatgctcagtaatgcacgaggccctccataatcattacacgcagaaatcattaagcttatcgccgggt

SEQ ID NO: 1361 - DNA, 1338 bp, Artificial Sequence
  Synthetic: HC Ab17
gaagtgcagctgctggaaagcggcggcggcgtggtgcagccgggccgtagcctgcgtctgagctgcgcggcgagcggctttacctttagcagctatgcgatgcattgggtgcgtcaggcgccgggcaaaggcctggaatgggtggcggtgattagctatgatggcagcaacaaatattatgcggatagcgtgaaaggccgttttaccattagccgtgataacagcaaaaacaccctgagcctgcagatgaacagcctgcgtgtggaagataccgcgatttattattgcgtgcgtggcgcgggccgtggctataccaacggcccggatggctttgatatttggggccagggcaccatggtgaccgtgagcagcaagggaccctcggtgttccctctcgccccctcatcgaggagcacgtccgaatcgactgcggcgctgggatgtctcgtgaaggactacttccccgagcccgtgaccgtgtcatggaactcaggcgcattgacctcgggagtgcacacgttcccggcagtgttgcagtcgtcgggcctttactcgctgtcgtccgtggtcacggtgccttcgtcgaatttcgggacgcagacttacacatgtaatgtggatcacaaaccgtccaataccaaggtcgataagacggtcgaaaggaaatgctgcgtggaatgtcctccctgcccagcaccgccagtcgcgggtcccagcgtctttttgttcccaccgaagcccaaggacacactgatgatcagccgtacgccggaggtaacatgcgtagtggtagatgtctcgcatgaggaccctgaagtgcagttcaattggtatgtagacggcgtggaggtgcacaacgccaagaccaagccacgagaagaacagttcaactcgacttttagagtggtatccgtcctgaccgtcgtgcaccaggactggctcaatggaaaggagtacaaatgcaaggtatccaacaaggggttgccagctccaatcgaaaagaccatctcaaagacaaaggggcagcccagagagccccaagtgtatacgcttccaccctcaagggaggagatgacaaagaatcaggtatcactcacatgtttggtgaaagggttttatccgagcgatattgcggtcgagtgggaaagcaacggtcaaccggagaacaactataagacgactccccctatgctggacagcgacgggtcgttctttctgtattccaaactcacggtggacaaatcgaggtggcagcaaggaaacgtattctcatgctcagtaatgcacgaggccctccataatcattacacgcagaaatcattaagcttatcgccgggt

SEQ ID NO: 1362 - DNA, 1338 bp, Artificial Sequence
  Synthetic: HC Ab18
gaagtgcagctgctggaaagcggcggcggcgtggtgcagccgggccgtagcctgcgtctgagctgcgcggcgagcggctttacctttagcagctatgcgatgcattgggtgcgtcaggcgccgggcaaaggcctggaatgggtggcggtgattagctatgatggcagcaacaaatattatgcggatagcgtgaaaggccgttttaccattagccgtgataacagcaaaaacaccctgagcctgcagatgaacagcctgcgtgtggaagataccgcgatttattattgcgtgcgtggcgcgggccgtggctttacctggggcccggatggctttgatatttggggccagggcaccatggtgaccgtgagcagcaagggaccctcggtgttccctctcgccccctcatcgaggagcacgtccgaatcgactgcggcgctgggatgtctcgtgaaggactacttccccgagcccgtgaccgtgtcatggaactcaggcgcattgacctcgggagtgcacacgttcccggcagtgttgcagtcgtcgggcctttactcgctgtcgtccgtggtcacggtgccttcgtcgaatttcgggacgcagacttacacatgtaatgtggatcacaaaccgtccaataccaaggtcgataagacggtcgaaaggaaatgctgcgtggaatgtcctccctgcccagcaccgccagtcgcgggtcccagcgtctttttgttcccaccgaagcccaaggacacactgatgatcagccgtacgccggaggtaacatgcgtagtggtagatgtctcgcatgaggaccctgaagtgcagttcaattggtatgtagacggcgtggaggtgcacaacgccaagaccaagccacgagaagaacagttcaactcgacttttagagtggtatccgtcctgaccgtcgtgcaccaggactggctcaatggaaaggagtacaaatgcaaggtatccaacaaggggttgccagctccaatcgaaaagaccatctcaaagacaaaggggcagcccagagagccccaagtgtatacgcttccaccctcaagggaggagatgacaaagaatcaggtatcactcacatgtttggtgaaagggttttatccgagcgatattgcggtcgagtgggaaagcaacggtcaaccggagaacaactataagacgactccccctatgctggacagcgacgggtcgttctttctgtattccaaactcacggtggacaaatcgaggtggcagcaaggaaacgtattctcatgctcagtaatgcacgaggccctccataatcattacacgcagaaatcattaagcttatcgccgggt

SEQ ID NO: 1363 - DNA, 1338 bp, Artificial Sequence
  Synthetic: HC Ab19
gaagtgcagctgctggaaagcggcggcggcgtggtgcagccgggccgtagcctgcgtctgagctgcgcggcgagcggctttacctttagcagctatgcgatgcattgggtgcgtcaggcgccgggcaaaggcctggaatgggtggcggtgattagctatgatggcagcaacaaatattatgcggatagcgtgaaaggccgttttaccattagccgtgataacagcaaaaacaccctgagcctgcagatgaacagcctgcgtgtggaagataccgcgatttattattgcgtgcgtggcgcgggccgtggctttaccctgggcccggatggctttgatatttggggccagggcaccatggtgaccgtgagcagcaagggaccctcggtgttccctctcgccccctcatcgaggagcacgtccgaatcgactgcggcgctgggatgtctcgtgaaggactacttccccgagcccgtgaccgtgtcatggaactcaggcgcattgacctcgggagtgcacacgttcccggcagtgttgcagtcgtcgggcctttactcgctgtcgtccgtggtcacggtgccttcgtcgaatttcgggacgcagacttacacatgtaatgtggatcacaaaccgtccaataccaaggtcgataagacggtcgaaaggaaatgctgcgtggaatgtcctccctgcccagcaccgccagtcgcgggtcccagcgtctttttgttcccaccgaagcccaaggacacactgatgatcagccgtacgccggaggtaacatgcgtagtggtagatgtctcgcatgaggaccctgaagtgcagttcaattggtatgtagacggcgtggaggtgcacaacgccaagaccaagccacgagaagaacagttcaactcgacttttagagtggtatccgtcctgaccgtcgtgcaccaggactggctcaatggaaaggagtacaaatgcaaggtatccaacaaggggttgccagctccaatcgaaaagaccatctcaaagacaaaggggcagcccagagagccccaagtgtatacgcttccaccctcaagggaggagatgacaaagaatcaggtatcactcacatgtttggtgaaagggttttatccgagcgatattgcggtcgagtgggaaagcaacggtcaaccggagaacaactataagacgactccccctatgctggacagcgacgggtcgttctttctgtattccaaactcacggtggacaaatcgaggtggcagcaaggaaacgtattctcatgctcagtaatgcacgaggccctccataatcattacacgcagaaatcattaagcttatcgccgggt

SEQ ID NO: 1364 - DNA, 1338 bp, Artificial Sequence
  Synthetic: HC Ab20
gaagtgcagctgctggaaagcggcggcggcgtggtgcagccgggccgtagcctgcgtctgagctgcgcggcgagcggctttacctttagcagctatgcgatgcattgggtgcgtcaggcgccgggcaaaggcctggaatgggtggcggtgattagctatgatggcagcaacaaatattatgcggatagcgtgaaaggccgttttaccattagccgtgataacagcaaaaacaccctgagcctgcagatgaacagcctgcgtgtggaagataccgcgatttattattgcgtgcgtggcgcgggccgtggcctgacctttggcccggatggctttgatatttggggccagggcaccatggtgaccgtgagcagcaagggaccctcggtgttccctctcgccccctcatcgaggagcacgtccgaatcgactgcggcgctgggatgtctcgtgaaggactacttccccgagcccgtgaccgtgtcatggaactcaggcgcattgacctcgggagtgcacacgttcccggcagtgttgcagtcgtcgggcctttactcgctgtcgtccgtggtcacggtgccttcgtcgaatttcgggacgcagacttacacatgtaatgtggatcacaaaccgtccaataccaaggtcgataagacggtcgaaaggaaatgctgcgtggaatgtcctccctgcccagcaccgccagtcgcgggtcccagcgtctttttgttcccaccgaagcccaaggacacactgatgatcagccgtacgccggaggtaacatgcgtagtggtagatgtctcgcatgaggaccctgaagtgcagttcaattggtatgtagacggcgtggaggtgcacaacgccaagaccaagccacgagaagaacagttcaactcgacttttagagtggtatccgtcctgaccgtcgtgcaccaggactggctcaatggaaaggagtacaaatgcaaggtatccaacaaggggttgccagctccaatcgaaaagaccatctcaaagacaaaggggcagcccagagagccccaagtgtatacgcttccaccctcaagggaggagatgacaaagaatcaggtatcactcacatgtttggtgaaagggttttatccgagcgatattgcggtcgagtgggaaagcaacggtcaaccggagaacaactataagacgactccccctatgctggacagcgacgggtcgttctttctgtattccaaactcacggtggacaaatcgaggtggcagcaaggaaacgtattctcatgctcagtaatgcacgaggccctccataatcattacacgcagaaatcattaagcttatcgccgggt

SEQ ID NO: 1365 - DNA, 1338 bp, Artificial Sequence
  Synthetic: HC Ab21
gaagtgcagctgctggaaagcggcggcggcgtggtgcagccgggccgtagcctgcgtctgagctgcgcggcgagcggctttacctttagcagctatgcgatgcattgggtgcgtcaggcgccgggcaaaggcctggaatgggtggcggtgattagctatgatggcagcaacaaatattatgcggatagcgtgaaaggccgttttaccattagccgtgataacagcaaaaacaccctgagcctgcagatgaacagcctgcgtgtggaagataccgcgatttattattgcgtgcgtggcgcgggcctgggctggccgtatggcccggatggctttgatatttggggccagggcaccatggtgaccgtgagcagcaagggaccctcggtgttccctctcgccccctcatcgaggagcacgtccgaatcgactgcggcgctgggatgtctcgtgaaggactacttccccgagcccgtgaccgtgtcatggaactcaggcgcattgacctcgggagtgcacacgttcccggcagtgttgcagtcgtcgggcctttactcgctgtcgtccgtggtcacggtgccttcgtcgaatttcgggacgcagacttacacatgtaatgtggatcacaaaccgtccaataccaaggtcgataagacggtcgaaaggaaatgctgcgtggaatgtcctccctgcccagcaccgccagtcgcgggtcccagcgtctttttgttcccaccgaagcccaaggacacactgatgatcagccgtacgccggaggtaacatgcgtagtggtagatgtctcgcatgaggaccctgaagtgcagttcaattggtatgtagacggcgtggaggtgcacaacgccaagaccaagccacgagaagaacagttcaactcgacttttagagtggtatccgtcctgaccgtcgtgcaccaggactggctcaatggaaaggagtacaaatgcaaggtatccaacaaggggttgccagctccaatcgaaaagaccatctcaaagacaaaggggcagcccagagagccccaagtgtatacgcttccaccctcaagggaggagatgacaaagaatcaggtatcactcacatgtttggtgaaagggttttatccgagcgatattgcggtcgagtgggaaagcaacggtcaaccggagaacaactataagacgactccccctatgctggacagcgacgggtcgttctttctgtattccaaactcacggtggacaaatcgaggtggcagcaaggaaacgtattctcatgctcagtaatgcacgaggccctccataatcattacacgcagaaatcattaagcttatcgccgggt

SEQ ID NO: 1366 - DNA, 1338 bp, Artificial Sequence
  Synthetic: HC Ab22
gaagtgcagctgctggaaagcggcggcggcgtggtgcagccgggccgtagcctgcgtctgagctgcgcggcgagcggctttacctttagcagctatgcgatgcattgggtgcgtcaggcgccgggcaaaggcctggaatgggtggcggtgattagctatgatggcagcaacaaatattatgcggatagcgtgaaaggccgttttaccattagccgtgataacagcaaaaacaccctgagcctgcagatgaacagcctgcgtgtggaagataccgcgatttattattgcgtgcgtggcgcgggccgtggctttaccaaaggcccggatggctttgatatttggggccagggcaccatggtgaccgtgagcagcaagggaccctcggtgttccctctcgccccctcatcgaggagcacgtccgaatcgactgcggcgctgggatgtctcgtgaaggactacttccccgagcccgtgaccgtgtcatggaactcaggcgcattgacctcgggagtgcacacgttcccggcagtgttgcagtcgtcgggcctttactcgctgtcgtccgtggtcacggtgccttcgtcgaatttcgggacgcagacttacacatgtaatgtggatcacaaaccgtccaataccaaggtcgataagacggtcgaaaggaaatgctgcgtggaatgtcctccctgcccagcaccgccagtcgcgggtcccagcgtctttttgttcccaccgaagcccaaggacacactgatgatcagccgtacgccggaggtaacatgcgtagtggtagatgtctcgcatgaggaccctgaagtgcagttcaattggtatgtagacggcgtggaggtgcacaacgccaagaccaagccacgagaagaacagttcaactcgacttttagagtggtatccgtcctgaccgtcgtgcaccaggactggctcaatggaaaggagtacaaatgcaaggtatccaacaaggggttgccagctccaatcgaaaagaccatctcaaagacaaaggggcagcccagagagccccaagtgtatacgcttccaccctcaagggaggagatgacaaagaatcaggtatcactcacatgtttggtgaaagggttttatccgagcgatattgcggtcgagtgggaaagcaacggtcaaccggagaacaactataagacgactccccctatgctggacagcgacgggtcgttctttctgtattccaaactcacggtggacaaatcgaggtggcagcaaggaaacgtattctcatgctcagtaatgcacgaggccctccataatcattacacgcagaaatcattaagcttatcgccgggt

SEQ ID NO: 1367 - DNA, 1338 bp, Artificial Sequence
  Synthetic: HC Ab23
gaagtgcagctgctggaaagcggcggcggcgtggtgcagccgggccgtagcctgcgtctgagctgcgcggcgagcggctttacctttagcagctatgcgatgcattgggtgcgtcaggcgccgggcaaaggcctggaatgggtggcggtgattagctatgatggcagcaacaaatattatgcggatagcgtgaaaggccgttttaccattagccgtgataacagcaaaaacaccctgagcctgcagatgaacagcctgcgtgtggaagataccgcgatttattattgcgtgcgtggcgcgggccgtggcctgacctatggcccggatggctttgatatttggggccagggcaccatggtgaccgtgagcagcaagggaccctcggtgttccctctcgccccctcatcgaggagcacgtccgaatcgactgcggcgctgggatgtctcgtgaaggactacttccccgagcccgtgaccgtgtcatggaactcaggcgcattgacctcgggagtgcacacgttcccggcagtgttgcagtcgtcgggcctttactcgctgtcgtccgtggtcacggtgccttcgtcgaatttcgggacgcagacttacacatgtaatgtggatcacaaaccgtccaataccaaggtcgataagacggtcgaaaggaaatgctgcgtggaatgtcctccctgcccagcaccgccagtcgcgggtcccagcgtctttttgttcccaccgaagcccaaggacacactgatgatcagccgtacgccggaggtaacatgcgtagtggtagatgtctcgcatgaggaccctgaagtgcagttcaattggtatgtagacggcgtggaggtgcacaacgccaagaccaagccacgagaagaacagttcaactcgacttttagagtggtatccgtcctgaccgtcgtgcaccaggactggctcaatggaaaggagtacaaatgcaaggtatccaacaaggggttgccagctccaatcgaaaagaccatctcaaagacaaaggggcagcccagagagccccaagtgtatacgcttccaccctcaagggaggagatgacaaagaatcaggtatcactcacatgtttggtgaaagggttttatccgagcgatattgcggtcgagtgggaaagcaacggtcaaccggagaacaactataagacgactccccctatgctggacagcgacgggtcgttctttctgtattccaaactcacggtggacaaatcgaggtggcagcaaggaaacgtattctcatgctcagtaatgcacgaggccctccataatcattacacgcagaaatcattaagcttatcgccgggt

SEQ ID NO: 1368 - DNA, 1338 bp, Artificial Sequence
  Synthetic: HC Ab24
gaagtgcagctgctggaaagcggcggcggcgtggtgcagccgggccgtagcctgcgtctgagctgcgcggcgagcggctttacctttagcagctatgcgatgcattgggtgcgtcaggcgccgggcaaaggcctggaatgggtggcggtgattagctatgatggcagcaacaaatattatgcggatagcgtgaaaggccgttttaccattagccgtgataacagcaaaaacaccctgagcctgcagatgaacagcctgcgtgtggaagataccgcgatttattattgcgtgcgtggcgcgggccgtggcctgatttatggcccggatggctttgatatttggggccagggcaccatggtgaccgtgagcagcaagggaccctcggtgttccctctcgccccctcatcgaggagcacgtccgaatcgactgcggcgctgggatgtctcgtgaaggactacttccccgagcccgtgaccgtgtcatggaactcaggcgcattgacctcgggagtgcacacgttcccggcagtgttgcagtcgtcgggcctttactcgctgtcgtccgtggtcacggtgccttcgtcgaatttcgggacgcagacttacacatgtaatgtggatcacaaaccgtccaataccaaggtcgataagacggtcgaaaggaaatgctgcgtggaatgtcctccctgcccagcaccgccagtcgcgggtcccagcgtctttttgttcccaccgaagcccaaggacacactgatgatcagccgtacgccggaggtaacatgcgtagtggtagatgtctcgcatgaggaccctgaagtgcagttcaattggtatgtagacggcgtggaggtgcacaacgccaagaccaagccacgagaagaacagttcaactcgacttttagagtggtatccgtcctgaccgtcgtgcaccaggactggctcaatggaaaggagtacaaatgcaaggtatccaacaaggggttgccagctccaatcgaaaagaccatctcaaagacaaaggggcagcccagagagccccaagtgtatacgcttccaccctcaagggaggagatgacaaagaatcaggtatcactcacatgtttggtgaaagggttttatccgagcgatattgcggtcgagtgggaaagcaacggtcaaccggagaacaactataagacgactccccctatgctggacagcgacgggtcgttctttctgtattccaaactcacggtggacaaatcgaggtggcagcaaggaaacgtattctcatgctcagtaatgcacgaggccctccataatcattacacgcagaaatcattaagcttatcgccgggt

SEQ ID NO: 1369 - DNA, 1338 bp, Artificial Sequence
  Synthetic: HC Ab25
gaagtgcagctgctggaaagcggcggcggcgtggtgcagccgggccgtagcctgcgtctgagctgcgcggcgagcggctttacctttagcagctatgcgatgcattgggtgcgtcaggcgccgggcaaaggcctggaatgggtggcggtgattagctatgatggcagcaacaaatattatgcggatagcgtgaaaggccgttttaccattagccgtgataacagcaaaaacaccctgagcctgcagatgaacagcctgcgtgtggaagataccgcgatttattattgcgtgcgtggcgcgggcctgggctttacctatggcccggatggctttgatatttggggccagggcaccatggtgaccgtgagcagcaagggaccctcggtgttccctctcgccccctcatcgaggagcacgtccgaatcgactgcggcgctgggatgtctcgtgaaggactacttccccgagcccgtgaccgtgtcatggaactcaggcgcattgacctcgggagtgcacacgttcccggcagtgttgcagtcgtcgggcctttactcgctgtcgtccgtggtcacggtgccttcgtcgaatttcgggacgcagacttacacatgtaatgtggatcacaaaccgtccaataccaaggtcgataagacggtcgaaaggaaatgctgcgtggaatgtcctccctgcccagcaccgccagtcgcgggtcccagcgtctttttgttcccaccgaagcccaaggacacactgatgatcagccgtacgccggaggtaacatgcgtagtggtagatgtctcgcatgaggaccctgaagtgcagttcaattggtatgtagacggcgtggaggtgcacaacgccaagaccaagccacgagaagaacagttcaactcgacttttagagtggtatccgtcctgaccgtcgtgcaccaggactggctcaatggaaaggagtacaaatgcaaggtatccaacaaggggttgccagctccaatcgaaaagaccatctcaaagacaaaggggcagcccagagagccccaagtgtatacgcttccaccctcaagggaggagatgacaaagaatcaggtatcactcacatgtttggtgaaagggttttatccgagcgatattgcggtcgagtgggaaagcaacggtcaaccggagaacaactataagacgactccccctatgctggacagcgacgggtcgttctttctgtattccaaactcacggtggacaaatcgaggtggcagcaaggaaacgtattctcatgctcagtaatgcacgaggccctccataatcattacacgcagaaatcattaagcttatcgccgggt

SEQ ID NO: 1370 - DNA, 1338 bp, Artificial Sequence
  Synthetic: HC Ab26
gaagtgcagctgctggaaagcggcggcggcgtggtgcagccgggccgtagcctgcgtctgagctgcgcggcgagcggctttacctttagcagctatgcgatgcattgggtgcgtcaggcgccgggcaaaggcctggaatgggtggcggtgattagctatgatggcagcaacaaatattatgcggatagcgtgaaaggccgttttaccattagccgtgataacagcaaaaacaccctgagcctgcagatgaacagcctgcgtgtggaagataccgcgatttattattgcgtgcgtggcgcgggccagggcctgagctatggcccggatggctttgatatttggggccagggcaccatggtgaccgtgagcagcaagggaccctcggtgttccctctcgccccctcatcgaggagcacgtccgaatcgactgcggcgctgggatgtctcgtgaaggactacttccccgagcccgtgaccgtgtcatggaactcaggcgcattgacctcgggagtgcacacgttcccggcagtgttgcagtcgtcgggcctttactcgctgtcgtccgtggtcacggtgccttcgtcgaatttcgggacgcagacttacacatgtaatgtggatcacaaaccgtccaataccaaggtcgataagacggtcgaaaggaaatgctgcgtggaatgtcctccctgcccagcaccgccagtcgcgggtcccagcgtctttttgttcccaccgaagcccaaggacacactgatgatcagccgtacgccggaggtaacatgcgtagtggtagatgtctcgcatgaggaccctgaagtgcagttcaattggtatgtagacggcgtggaggtgcacaacgccaagaccaagccacgagaagaacagttcaactcgacttttagagtggtatccgtcctgaccgtcgtgcaccaggactggctcaatggaaaggagtacaaatgcaaggtatccaacaaggggttgccagctccaatcgaaaagaccatctcaaagacaaaggggcagcccagagagccccaagtgtatacgcttccaccctcaagggaggagatgacaaagaatcaggtatcactcacatgtttggtgaaagggttttatccgagcgatattgcggtcgagtgggaaagcaacggtcaaccggagaacaactataagacgactccccctatgctggacagcgacgggtcgttctttctgtattccaaactcacggtggacaaatcgaggtggcagcaaggaaacgtattctcatgctcagtaatgcacgaggccctccataatcattacacgcagaaatcattaagcttatcgccgggt

SEQ ID NO: 1371 - DNA, 1338 bp, Artificial Sequence
  Synthetic: HC Ab27
gaagtgcagctgctggaaagcggcggcggcgtggtgcagccgggccgtagcctgcgtctgagctgcgcggcgagcggctttacctttagcagctatgcgatgcattgggtgcgtcaggcgccgggcaaaggcctggaatgggtggcggtgattagctatgatggcagcaacaaatattatgcggatagcgtgaaaggccgttttaccattagccgtgataacagcaaaaacaccctgagcctgcagatgaacagcctgcgtgtggaagataccgcgatttattattgcgtgcgtggcgcgggccgtggctataccctgggcccggatggctttgatatttggggccagggcaccatggtgaccgtgagcagcaagggaccctcggtgttccctctcgccccctcatcgaggagcacgtccgaatcgactgcggcgctgggatgtctcgtgaaggactacttccccgagcccgtgaccgtgtcatggaactcaggcgcattgacctcgggagtgcacacgttcccggcagtgttgcagtcgtcgggcctttactcgctgtcgtccgtggtcacggtgccttcgtcgaatttcgggacgcagacttacacatgtaatgtggatcacaaaccgtccaataccaaggtcgataagacggtcgaaaggaaatgctgcgtggaatgtcctccctgcccagcaccgccagtcgcgggtcccagcgtctttttgttcccaccgaagcccaaggacacactgatgatcagccgtacgccggaggtaacatgcgtagtggtagatgtctcgcatgaggaccctgaagtgcagttcaattggtatgtagacggcgtggaggtgcacaacgccaagaccaagccacgagaagaacagttcaactcgacttttagagtggtatccgtcctgaccgtcgtgcaccaggactggctcaatggaaaggagtacaaatgcaaggtatccaacaaggggttgccagctccaatcgaaaagaccatctcaaagacaaaggggcagcccagagagccccaagtgtatacgcttccaccctcaagggaggagatgacaaagaatcaggtatcactcacatgtttggtgaaagggttttatccgagcgatattgcggtcgagtgggaaagcaacggtcaaccggagaacaactataagacgactccccctatgctggacagcgacgggtcgttctttctgtattccaaactcacggtggacaaatcgaggtggcagcaaggaaacgtattctcatgctcagtaatgcacgaggccctccataatcattacacgcagaaatcattaagcttatcgccgggt

SEQ ID NO: 1372 - DNA, 1338 bp, Artificial Sequence
  Synthetic: HC Ab28
gaagtgcagctgctggaaagcggcggcggcgtggtgcagccgggccgtagcctgcgtctgagctgcgcggcgagcggctttacctttagcagctatgcgatgcattgggtgcgtcaggcgccgggcaaaggcctggaatgggtggcggtgattagctatgatggcagcaacaaatattatgcggatagcgtgaaaggccgttttaccattagccgtgataacagcaaaaacaccctgagcctgcagatgaacagcctgcgtgtggaagataccgcgatttattattgcgtgcgtggcgcgggccgtggctttacctatggcccggatggctttgatatttggggccagggcaccatggtgaccgtgagcagcaagggaccctcggtgttccctctcgccccctcatcgaggagcacgtccgaatcgactgcggcgctgggatgtctcgtgaaggactacttccccgagcccgtgaccgtgtcatggaactcaggcgcattgacctcgggagtgcacacgttcccggcagtgttgcagtcgtcgggcctttactcgctgtcgtccgtggtcacggtgccttcgtcgaatttcgggacgcagacttacacatgtaatgtggatcacaaaccgtccaataccaaggtcgataagacggtcgaaaggaaatgctgcgtggaatgtcctccctgcccagcaccgccagtcgcgggtcccagcgtctttttgttcccaccgaagcccaaggacacactgatgatcagccgtacgccggaggtaacatgcgtagtggtagatgtctcgcatgaggaccctgaagtgcagttcaattggtatgtagacggcgtggaggtgcacaacgccaagaccaagccacgagaagaacagttcaactcgacttttagagtggtatccgtcctgaccgtcgtgcaccaggactggctcaatggaaaggagtacaaatgcaaggtatccaacaaggggttgccagctccaatcgaaaagaccatctcaaagacaaaggggcagcccagagagccccaagtgtatacgcttccaccctcaagggaggagatgacaaagaatcaggtatcactcacatgtttggtgaaagggttttatccgagcgatattgcggtcgagtgggaaagcaacggtcaaccggagaacaactataagacgactccccctatgctggacagcgacgggtcgttctttctgtattccaaactcacggtggacaaatcgaggtggcagcaaggaaacgtattctcatgctcagtaatgcacgaggccctccataatcattacacgcagaaatcattaagcttatcgccgggt

SEQ ID NO: 1373 - DNA, 1338 bp, Artificial Sequence; identical to SEQ ID NO: 1365
  Synthetic: HC Ab29

SEQ ID NO: 1374 - DNA, 1338 bp, Artificial Sequence
  Synthetic: HC Ab30
  misc_feature (265)..(267): n is a, c, g, or t
  misc_feature (271)..(276): n is a, c, g, or t
gaagtgcagctgctggaaagcggcggcggcgtggtgcagccgggccgtagcctgcgtctgagctgcgcggcgagcggctttacctttagcagctatgcgatgcattgggtgcgtcaggcgccgggcaaaggcctggaatgggtggcggtgattagctatgatggcagcaacaaatattatgcggatagcgtgaaaggccgttttaccattagccgtgataacagcaaaaacaccctgagcctgcagatgaacagcctgcgtgtgnnnaaannnnnnatttattattgcgtgcgtggcgcgggccgtggctttacctggggcccggatggctttgatatttggggccagggcaccatggtgaccgtgagcagcaagggaccctcggtgttccctctcgccccctcatcgaggagcacgtccgaatcgactgcggcgctgggatgtctcgtgaaggactacttccccgagcccgtgaccgtgtcatggaactcaggcgcattgacctcgggagtgcacacgttcccggcagtgttgcagtcgtcgggcctttactcgctgtcgtccgtggtcacggtgccttcgtcgaatttcgggacgcagacttacacatgtaatgtggatcacaaaccgtccaataccaaggtcgataagacggtcgaaaggaaatgctgcgtggaatgtcctccctgcccagcaccgccagtcgcgggtcccagcgtctttttgttcccaccgaagcccaaggacacactgatgatcagccgtacgccggaggtaacatgcgtagtggtagatgtctcgcatgaggaccctgaagtgcagttcaattggtatgtagacggcgtggaggtgcacaacgccaagaccaagccacgagaagaacagttcaactcgacttttagagtggtatccgtcctgaccgtcgtgcaccaggactggctcaatggaaaggagtacaaatgcaaggtatccaacaaggggttgccagctccaatcgaaaagaccatctcaaagacaaaggggcagcccagagagccccaagtgtatacgcttccaccctcaagggaggagatgacaaagaatcaggtatcactcacatgtttggtgaaagggttttatccgagcgatattgcggtcgagtgggaaagcaacggtcaaccggagaacaactataagacgactccccctatgctggacagcgacgggtcgttctttctgtattccaaactcacggtggacaaatcgaggtggcagcaaggaaacgtattctcatgctcagtaatgcacgaggccctccataatcattacacgcagaaatcattaagcttatcgccgggt

SEQ ID NO: 1375 - DNA, 1338 bp, Artificial Sequence; identical to SEQ ID NO: 1367
  Synthetic: HC Ab31

SEQ ID NO: 1376 - DNA, 1338 bp, Artificial Sequence; identical to SEQ ID NO: 1369
  Synthetic: HC Ab32

SEQ ID NO: 1377 - DNA, 1338 bp, Artificial Sequence; identical to SEQ ID NO: 1370
  Synthetic: HC Ab33

SEQ ID NO: 1378 - DNA, 1338 bp, Artificial Sequence; identical to SEQ ID NO: 1360
  Synthetic: HC Ab34

SEQ ID NO: 1379 - DNA, 1338 bp, Artificial Sequence; identical to SEQ ID NO: 1361
  Synthetic: HC Ab35

SEQ ID NO: 1380 - DNA, 1338 bp, Artificial Sequence; identical to SEQ ID NO: 1372
  Synthetic: HC Ab36

SEQ ID NO: 1381 - DNA, 1338 bp, Artificial Sequence; identical to SEQ ID NO: 1367
  Synthetic: HC Ab37

SEQ ID NO: 1382 - DNA, 1338 bp, Artificial Sequence
  Synthetic: HC Ab38
gaagtgcagctgctggaaagcggcggcggcgtggtgcagccgggccgtagcctgcgtctgagctgcgcggcgagcggctttacctttagcagctatgcgatgcattgggtgcgtcaggcgccgggcaaaggcctggaatgggtggcggtgattagctatgatggcagcaacaaatattatgcggatagcgtgaaaggccgttttaccattagccgtgataacagcaaaaacaccctgagcctgcagatgaacagcctgcgtgtggaagataccgcgatttattattgcgtgcgtggcgcgggccagggctatccgtatggcccggatggctttgatatttggggccagggcaccatggtgaccgtgagcagcaagggaccctcggtgttccctctcgccccctcatcgaggagcacgtccgaatcgactgcggcgctgggatgtctcgtgaaggactacttccccgagcccgtgaccgtgtcatggaactcaggcgcattgacctcgggagtgcacacgttcccggcagtgttgcagtcgtcgggcctttactcgctgtcgtccgtggtcacggtgccttcgtcgaatttcgggacgcagacttacacatgtaatgtggatcacaaaccgtccaataccaaggtcgataagacggtcgaaaggaaatgctgcgtggaatgtcctccctgcccagcaccgccagtcgcgggtcccagcgtctttttgttcccaccgaagcccaaggacacactgatgatcagccgtacgccggaggtaacatgcgtagtggtagatgtctcgcatgaggaccctgaagtgcagttcaattggtatgtagacggcgtggaggtgcacaacgccaagaccaagccacgagaagaacagttcaactcgacttttagagtggtatccgtcctgaccgtcgtgcaccaggactggctcaatggaaaggagtacaaatgcaaggtatccaacaaggggttgccagctccaatcgaaaagaccatctcaaagacaaaggggcagcccagagagccccaagtgtatacgcttccaccctcaagggaggagatgacaaagaatcaggtatcactcacatgtttggtgaaagggttttatccgagcgatattgcggtcgagtgggaaagcaacggtcaaccggagaacaactataagacgactccccctatgctggacagcgacgggtcgttctttctgtattccaaactcacggtggacaaatcgaggtggcagcaaggaaacgtattctcatgctcagtaatgcacgaggccctccataatcattacacgcagaaatcattaagcttatcgccgggt

SEQ ID NO: 1383 - DNA, 1338 bp, Artificial Sequence
  Synthetic: HC Ab39
gaagtgcagctgctggaaagcggcggcggcgtggtgcagccgggccgtagcctgcgtctgagctgcgcggcgagcggctttacctttagcagctatgcgatgcattgggtgcgtcaggcgccgggcaaaggcctggaatgggtggcggtgattagctatgatggcagcaacaaatattatgcggatagcgtgaaaggccgttttaccattagccgtgataacagcaaaaacaccctgagcctgcagatgaacagcctgcgtgtggaagataccgcgatttattattgcgtgcgtggcgcgggcaccggctttacctatggcccggatggctttgatatttggggccagggcaccatggtgaccgtgagcagcaagggaccctcggtgttccctctcgccccctcatcgaggagcacgtccgaatcgactgcggcgctgggatgtctcgtgaaggactacttccccgagcccgtgaccgtgtcatggaactcaggcgcattgacctcgggagtgcacacgttcccggcagtgttgcagtcgtcgggcctttactcgctgtcgtccgtggtcacggtgccttcgtcgaatttcgggacgcagacttacacatgtaatgtggatcacaaaccgtccaataccaaggtcgataagacggtcgaaaggaaatgctgcgtggaatgtcctccctgcccagcaccgccagtcgcgggtcccagcgtctttttgttcccaccgaagcccaaggacacactgatgatcagccgtacgccggaggtaacatgcgtagtggtagatgtctcgcatgaggaccctgaagtgcagttcaattggtatgtagacggcgtggaggtgcacaacgccaagaccaagccacgagaagaacagttcaactcgacttttagagtggtatccgtcctgaccgtcgtgcaccaggactggctcaatggaaaggagtacaaatgcaaggtatccaacaaggggttgccagctccaatcgaaaagaccatctcaaagacaaaggggcagcccagagagccccaagtgtatacgcttccaccctcaagggaggagatgacaaagaatcaggtatcactcacatgtttggtgaaagggttttatccgagcgatattgcggtcgagtgggaaagcaacggtcaaccggagaacaactataagacgactccccctatgctggacagcgacgggtcgttctttctgtattccaaactcacggtggacaaatcgaggtggcagcaaggaaacgtattctcatgctcagtaatgcacgaggccctccataatcattacacgcagaaatcattaagcttatcgccgggt

SEQ ID NO: 1384 - DNA, 1338 bp, Artificial Sequence
  Synthetic: HC Ab40
gaagtgcagctgctggaaagcggcggcggcgtggtgcagccgggccgtagcctgcgtctgagctgcgcggcgagcggctttacctttagcagctatgcgatgcattgggtgcgtcaggcgccgggcaaaggcctggaatgggtggcggtgattagctatgatggcagcaacaaatattatgcggatagcgtgaaaggccgttttaccattagccgtgataacagcaaaaacaccctgagcctgcagatgaacagcctgcgtgtggaagataccgcgatttattattgcgtgcgtggcgcgggcatgggcctgacctatggcccggatggctttgatatttggggccagggcaccatggtgaccgtgagcagcaagggaccctcggtgttccctctcgccccctcatcgaggagcacgtccgaatcgactgcggcgctgggatgtctcgtgaaggactacttccccgagcccgtgaccgtgtcatggaactcaggcgcattgacctcgggagtgcacacgttcccggcagtgttgcagtcgtcgggcctttactcgctgtcgtccgtggtcacggtgccttcgtcgaatttcgggacgcagacttacacatgtaatgtggatcacaaaccgtccaataccaaggtcgataagacggtcgaaaggaaatgctgcgtggaatgtcctccctgcccagcaccgccagtcgcgggtcccagcgtctttttgttcccaccgaagcccaaggacacactgatgatcagccgtacgccggaggtaacatgcgtagtggtagatgtctcgcatgaggaccctgaagtgcagttcaattggtatgtagacggcgtggaggtgcacaacgccaagaccaagccacgagaagaacagttcaactcgacttttagagtggtatccgtcctgaccgtcgtgcaccaggactggctcaatggaaaggagtacaaatgcaaggtatccaacaaggggttgccagctccaatcgaaaagaccatctcaaagacaaaggggcagcccagagagccccaagtgtatacgcttccaccctcaagggaggagatgacaaagaatcaggtatcactcacatgtttggtgaaagggttttatccgagcgatattgcggtcgagtgggaaagcaacggtcaaccggagaacaactataagacgactccccctatgctggacagcgacgggtcgttctttctgtattccaaactcacggtggacaaatcgaggtggcagcaaggaaacgtattctcatgctcagtaatgcacgaggccctccataatcattacacgcagaaatcattaagcttatcgccgggt

SEQ ID NO: 1385 - DNA, 1338 bp, Artificial Sequence
  Synthetic: HC Ab41
gaagtgcagctgctggaaagcggcggcggcgtggtgcagccgggccgtagcctgcgtctgagctgcgcggcgagcggctttacctttagcagctatgcgatgcattgggtgcgtcaggcgccgggcaaaggcctggaatgggtggcggtgattagctatgatggcagcaacaaatattatgcggatagcgtgaaaggccgttttaccattagccgtgataacagcaaaaacaccctgagcctgcagatgaacagcctgcgtgtggaagataccgcgatttattattgcgtgcgtggcgcgggcctgggctttccgtatggcccggatggctttgatatttggggccagggcaccatggtgaccgtgagcagcaagggaccctcggtgttccctctcgccccctcatcgaggagcacgtccgaatcgactgcggcgctgggatgtctcgtgaaggactacttccccgagcccgtgaccgtgtcatggaactcaggcgcattgacctcgggagtgcacacgttcccggcagtgttgcagtcgtcgggcctttactcgctgtcgtccgtggtcacggtgccttcgtcgaatttcgggacgcagacttacacatgtaatgtggatcacaaaccgtccaataccaaggtcgataagacggtcgaaaggaaatgctgcgtggaatgtcctccctgcccagcaccgccagtcgcgggtcccagcgtctttttgttcccaccgaagcccaaggacacactgatgatcagccgtacgccggaggtaacatgcgtagtggtagatgtctcgcatgaggaccctgaagtgcagttcaattggtatgtagacggcgtggaggtgcacaacgccaagaccaagccacgagaagaacagttcaactcgacttttagagtggtatccgtcctgaccgtcgtgcaccaggactggctcaatggaaaggagtacaaatgcaaggtatccaacaaggggttgccagctccaatcgaaaagaccatctcaaagacaaaggggcagcccagagagccccaagtgtatacgcttccaccctcaagggaggagatgacaaagaatcaggtatcactcacatgtttggtgaaagggttttatccgagcgatattgcggtcgagtgggaaagcaacggtcaaccggagaacaactataagacgactccccctatgctggacagcgacgggtcgttctttctgtattccaaactcacggtggacaaatcgaggtggcagcaaggaaacgtattctcatgctcagtaatgcacgaggccctccataatcattacacgcagaaatcattaagcttatcgccgggt

SEQ ID NO: 1386 - DNA, 1338 bp, Artificial Sequence
  Synthetic: HC Ab42
gaagtgcagctgctggaaagcggcggcggcgtggtgcagccgggccgtagcctgcgtctgagctgcgcggcgagcggctttacctttagcagctatgcgatgcattgggtgcgtcaggcgccgggcaaaggcctggaatgggtggcggtgattagctatgatggcagcaacaaatattatgcggatagcgtgaaaggccgttttaccattagccgtgataacagcaaaaacaccctgagcctgcagatgaacagcctgcgtgtggaagataccgcgatttattattgcgtgcgtggcgcgggcctgggctgggcgtatggcccggatggctttgatatttggggccagggcaccatggtgaccgtgagcagcaagggaccctcggtgttccctctcgccccctcatcgaggagcacgtccgaatcgactgcggcgctgggatgtctcgtgaaggactacttccccgagcccgtgaccgtgtcatggaactcaggcgcattgacctcgggagtgcacacgttcccggcagtgttgcagtcgtcgggcctttactcgctgtcgtccgtggtcacggtgccttcgtcgaatttcgggacgcagacttacacatgtaatgtggatcacaaaccgtccaataccaaggtcgataagacggtcgaaaggaaatgctgcgtggaatgtcctccctgcccagcaccgccagtcgcgggtcccagcgtctttttgttcccaccgaagcccaaggacacactgatgatcagccgtacgccggaggtaacatgcgtagtggtagatgtctcgcatgaggaccctgaagtgcagttcaattggtatgtagacggcgtggaggtgcacaacgccaagaccaagccacgagaagaacagttcaactcgacttttagagtggtatccgtcctgaccgtcgtgcaccaggactggctcaatggaaaggagtacaaatgcaaggtatccaacaaggggttgccagctccaatcgaaaagaccatctcaaagacaaaggggcagcccagagagccccaagtgtatacgcttccaccctcaagggaggagatgacaaagaatcaggtatcactcacatgtttggtgaaagggttttatccgagcgatattgcggtcgagtgggaaagcaacggtcaaccggagaacaactataagacgactccccctatgctggacagcgacgggtcgttctttctgtattccaaactcacggtggacaaatcgaggtggcagcaaggaaacgtattctcatgctcagtaatgcacgaggccctccataatcattacacgcagaaatcattaagcttatcgccgggt

SEQ ID NO: 1387 - DNA, 1338 bp, Artificial Sequence
  Synthetic: HC Ab43
gaagtgcagctgctggaaagcggcggcggcgtggtgcagccgggccgtagcctgcgtctgagctgcgcggcgagcggctttacctttagcagctatgcgatgcattgggtgcgtcaggcgccgggcaaaggcctggaatgggtggcggtgattagctatgatggcagcaacaaatattatgcggatagcgtgaaaggccgttttaccattagccgtgataacagcaaaaacaccctgagcctgcagatgaacagcctgcgtgtggaagataccgcgatttattattgcgtgcgtggcgcgggccgtggctatccgtatggcccggatggctttgatatttggggccagggcaccatggtgaccgtgagcagcaagggaccctcggtgttccctctcgccccctcatcgaggagcacgtccgaatcgactgcggcgctgggatgtctcgtgaaggactacttccccgagcccgtgaccgtgtcatggaactcaggcgcattgacctcgggagtgcacacgttcccggcagtgttgcagtcgtcgggcctttactcgctgtcgtccgtggtcacggtgccttcgtcgaatttcgggacgcagacttacacatgtaatgtggatcacaaaccgtccaataccaaggtcgataagacggtcgaaaggaaatgctgcgtggaatgtcctccctgcccagcaccgccagtcgcgggtcccagcgtctttttgttcccaccgaagcccaaggacacactgatgatcagccgtacgccggaggtaacatgcgtagtggtagatgtctcgcatgaggaccctgaagtgcagttcaattggtatgtagacggcgtggaggtgcacaacgccaagaccaagccacgagaagaacagttcaactcgacttttagagtggtatccgtcctgaccgtcgtgcaccaggactggctcaatggaaaggagtacaaatgcaaggtatccaacaaggggttgccagctccaatcgaaaagaccatctcaaagacaaaggggcagcccagagagccccaagtgtatacgcttccaccctcaagggaggagatgacaaagaatcaggtatcactcacatgtttggtgaaagggttttatccgagcgatattgcggtcgagtgggaaagcaacggtcaaccggagaacaactataagacgactccccctatgctggacagcgacgggtcgttctttctgtattccaaactcacggtggacaaatcgaggtggcagcaaggaaacgtattctcatgctcagtaatgcacgaggccctccataatcattacacgcagaaatcattaagcttatcgccgggt

SEQ ID NO: 1388 - DNA, 1338 bp, Artificial Sequence
  Synthetic: HC Ab44
gaagtgcagctgctggaaagcggcggcggcgtggtgcagccgggccgtagcctgcgtctgagctgcgcggcgagcggctttgattttgcgggctatgcgatgcattgggtgcgtcaggcgccgggcaaaggcctggaatgggtggcggtgattagctatgatggcagcaacaaatattatgcggatagcgtgaaaggccgttttaccattagccgtgataacagcaaaaacaccctgagcctgcagatgaacagcctgcgtgtggaagataccgcgatttattattgcgtgcgtggcgcgggccgtggcctgacctatggcccggatggctttgatatttggggccagggcaccatggtgaccgtgagcagcaagggaccctcggtgttccctctcgccccctcatcgaggagcacgtccgaatcgactgcggcgctgggatgtctcgtgaaggactacttccccgagcccgtgaccgtgtcatggaactcaggcgcattgacctcgggagtgcacacgttcccggcagtgttgcagtcgtcgggcctttactcgctgtcgtccgtggtcacggtgccttcgtcgaatttcgggacgcagacttacacatgtaatgtggatcacaaaccgtccaataccaaggtcgataagacggtcgaaaggaaatgctgcgtggaatgtcctccctgcccagcaccgccagtcgcgggtcccagcgtctttttgttcccaccgaagcccaaggacacactgatgatcagccgtacgccggaggtaacatgcgtagtggtagatgtctcgcatgaggaccctgaagtgcagttcaattggtatgtagacggcgtggaggtgcacaacgccaagaccaagccacgagaagaacagttcaactcgacttttagagtggtatccgtcctgaccgtcgtgcaccaggactggctcaatggaaaggagtacaaatgcaaggtatccaacaaggggttgccagctccaatcgaaaagaccatctcaaagacaaaggggcagcccagagagccccaagtgtatacgcttccaccctcaagggaggagatgacaaagaatcaggtatcactcacatgtttggtgaaagggttttatccgagcgatattgcggtcgagtgggaaagcaacggtcaaccggagaacaactataagacgactccccctatgctggacagcgacgggtcgttctttctgtattccaaactcacggtggacaaatcgaggtggcagcaaggaaacgtattctcatgctcagtaatgcacgaggccctccataatcattacacgcagaaatcattaagcttatcgccgggt

SEQ ID NO: 1389 - DNA, 1338 bp, Artificial Sequence
  Synthetic: HC Ab45
gaagtgcagctgctggaaagcggcggcggcgtggtgcagccgggccgtagcctgcgtctgagctgcgcggcgagcggctttacctttagcagctatgcgatgcattgggtgcgtcaggcgccgggcaaaggcctggaatgggtggcggtgattagctatgatggcagcaacaaatattatgcggatagcgtgaaaggccgttttaccattagccgtgataacagcaaaaacaccctgagcctgcagatgaacagcctgcgtgtggaagataccgcgatttattattgcgtgcgtggcgcgggcctgggcctgacctatggcccggatggctttgatatttggggccagggcaccatggtgaccgtgagcagcaagggaccctcggtgttccctctcgccccctcatcgaggagcacgtccgaatcgactgcggcgctgggatgtctcgtgaaggactacttccccgagcccgtgaccgtgtcatggaactcaggcgcattgacctcgggagtgcacacgttcccggcagtgttgcagtcgtcgggcctttactcgctgtcgtccgtggtcacggtgccttcgtcgaatttcgggacgcagacttacacatgtaatgtggatcacaaaccgtccaataccaaggtcgataagacggtcgaaaggaaatgctgcgtggaatgtcctccctgcccagcaccgccagtcgcgggtcccagcgtctttttgttcccaccgaagcccaaggacacactgatgatcagccgtacgccggaggtaacatgcgtagtggtagatgtctcgcatgaggaccctgaagtgcagttcaattggtatgtagacggcgtggaggtgcacaacgccaagaccaagccacgagaagaacagttcaactcgacttttagagtggtatccgtcctgaccgtcgtgcaccaggactggctcaatggaaaggagtacaaatgcaaggtatccaacaaggggttgccagctccaatcgaaaagaccatctcaaagacaaaggggcagcccagagagccccaagtgtatacgcttccaccctcaagggaggagatgacaaagaatcaggtatcactcacatgtttggtgaaagggttttatccgagcgatattgcggtcgagtgggaaagcaacggtcaaccggagaacaactataagacgactccccctatgctggacagcgacgggtcgttctttctgtattccaaactcacggtggacaaatcgaggtggcagcaaggaaacgtattctcatgctcagtaatgcacgaggccctccataatcattacacgcagaaatcattaagcttatcgccgggt

SEQ ID NO: 1390 - DNA, 1338 bp, Artificial Sequence
  Synthetic: HC Ab46
gaagtgcagctgctggaaagcggcggcggcgtggtgcagccgggccgtagcctgcgtctgagctgcgcggcgagcggctttacctttagcagctatgcgatgcattgggtgcgtcaggcgccgggcaaaggcctggaatgggtggcggtgattagctatgatggcagcaacaaatattatgcggatagcgtgaaaggccgttttaccattagccgtgataacagcaaaaacaccctgagcctgcagatgaacagcctgcgtgtggaagataccgcgatttattattgcgtgcgtggcgcgggcctgggctatccgtatggcccggatggctttgatatttggggccagggcaccatggtgaccgtgagcagcaagggaccctcggtgttccctctcgccccctcatcgaggagcacgtccgaatcgactgcggcgctgggatgtctcgtgaaggactacttccccgagcccgtgaccgtgtcatggaactcaggcgcattgacctcgggagtgcacacgttcccggcagtgttgcagtcgtcgggcctttactcgctgtcgtccgtggtcacggtgccttcgtcgaatttcgggacgcagacttacacatgtaatgtggatcacaaaccgtccaataccaaggtcgataagacggtcgaaaggaaatgctgcgtggaatgtcctccctgcccagcaccgccagtcgcgggtcccagcgtctttttgttcccaccgaagcccaaggacacactgatgatcagccgtacgccggaggtaacatgcgtagtggtagatgtctcgcatgaggaccctgaagtgcagttcaattggtatgtagacggcgtggaggtgcacaacgccaagaccaagccacgagaagaacagttcaactcgacttttagagtggtatccgtcctgaccgtcgtgcaccaggactggctcaatggaaaggagtacaaatgcaaggtatccaacaaggggttgccagctccaatcgaaaagaccatctcaaagacaaaggggcagcccagagagccccaagtgtatacgcttccaccctcaagggaggagatgacaaagaatcaggtatcactcacatgtttggtgaaagggttttatccgagcgatattgcggtcgagtgggaaagcaacggtcaaccggagaacaactataagacgactccccctatgctggacagcgacgggtcgttctttctgtattccaaactcacggtggacaaatcgaggtggcagcaaggaaacgtattctcatgctcagtaatgcacgaggccctccataatcattacacgcagaaatcattaagcttatcgccgggt

SEQ ID NO: 1391 - DNA, 1338 bp, Artificial Sequence
  Synthetic: HC Ab47
gaagtgcagctgctggaaagcggcggcggcgtggtgcagccgggccgtagcctgcgtctgagctgcgcggcgagcggctttacctttagcagctatgcgatgcattgggtgcgtcaggcgccgggcaaaggcctggaatgggtggcggtgattagctatgatggcagcaacaaatattatgcggatagcgtgaaaggccgttttaccattagccgtgataacagcaaaaacaccctgagcctgcagatgaacagcctgcgtgtggaagataccgcgatttattattgcgtgcgtggcgcgggccgtggctatccgcatggcccggatggctttgatatttggggccagggcaccatggtgaccgtgagcagcaagggaccctcggtgttccctctcgccccctcatcgaggagcacgtccgaatcgactgcggcgctgggatgtctcgtgaaggactacttccccgagcccgtgaccgtgtcatggaactcaggcgcattgacctcgggagtgcacacgttcccggcagtgttgcagtcgtcgggcctttactcgctgtcgtccgtggtcacggtgccttcgtcgaatttcgggacgcagacttacacatgtaatgtggatcacaaaccgtccaataccaaggtcgataagacggtcgaaaggaaatgctgcgtggaatgtcctccctgcccagcaccgccagtcgcgggtcccagcgtctttttgttcccaccgaagcccaaggacacactgatgatcagccgtacgccggaggtaacatgcgtagtggtagatgtctcgcatgaggaccctgaagtgcagttcaattggtatgtagacggcgtggaggtgcacaacgccaagaccaagccacgagaagaacagttcaactcgacttttagagtggtatccgtcctgaccgtcgtgcaccaggactggctcaatggaaaggagtacaaatgcaaggtatccaacaaggggttgccagctccaatcgaaaagaccatctcaaagacaaaggggcagcccagagagccccaagtgtatacgcttccaccctcaagggaggagatgacaaagaatcaggtatcactcacatgtttggtgaaagggttttatccgagcgatattgcggtcgagtgggaaagcaacggtcaaccggagaacaactataagacgactccccctatgctggacagcgacgggtcgttctttctgtattccaaactcacggtggacaaatcgaggtggcagcaaggaaacgtattctcatgctcagtaatgcacgaggccctccataatcattacacgcagaaatcattaagcttatcgccgggt

SEQ ID NO: 1392 - DNA, 1338 bp, Artificial Sequence
  Synthetic: HC Ab48
gaagtgcagctgctggaaagcggcggcggcgtggtgcagccgggccgtagcctgcgtctgagctgcgcggcgagcggctttacctttagcagctatgcgatgcattgggtgcgtcaggcgccgggcaaaggcctggaatgggtggcggtgattagctatgatggcagcaacaaatattatgcggatagcgtgaaaggccgttttaccattagccgtgataacagcaaaaacaccctgagcctgcagatgaacagcctgcgtgtggaagataccgcgatttattattgcgtgcgtggcgcgggcattggctatccgcatggcccggatggctttgatatttggggccagggcaccatggtgaccgtgagcagcaagggaccctcggtgttccctctcgccccctcatcgaggagcacgtccgaatcgactgcggcgctgggatgtctcgtgaaggactacttccccgagcccgtgaccgtgtcatggaactcaggcgcattgacctcgggagtgcacacgttcccggcagtgttgcagtcgtcgggcctttactcgctgtcgtccgtggtcacggtgccttcgtcgaatttcgggacgcagacttacacatgtaatgtggatcacaaaccgtccaataccaaggtcgataagacggtcgaaaggaaatgctgcgtggaatgtcctccctgcccagcaccgccagtcgcgggtcccagcgtctttttgttcccaccgaagcccaaggacacactgatgatcagccgtacgccggaggtaacatgcgtagtggtagatgtctcgcatgaggaccctgaagtgcagttcaattggtatgtagacggcgtggaggtgcacaacgccaagaccaagccacgagaagaacagttcaactcgacttttagagtggtatccgtcctgaccgtcgtgcaccaggactggctcaatggaaaggagtacaaatgcaaggtatccaacaaggggttgccagctccaatcgaaaagaccatctcaaagacaaaggggcagcccagagagccccaagtgtatacgcttccaccctcaagggaggagatgacaaagaatcaggtatcactcacatgtttggtgaaagggttttatccgagcgatattgcggtcgagtgggaaagcaacggtcaaccggagaacaactataagacgactccccctatgctggacagcgacgggtcgttctttctgtattccaaactcacggtggacaaatcgaggtggcagcaaggaaacgtattctcatgctcagtaatgcacgaggccctccataatcattacacgcagaaatcattaagcttatcgccgggt

SEQ ID NO: 1393 - DNA, 1338 bp, Artificial Sequence; identical to SEQ ID NO: 1387
  Synthetic: HC Ab49

SEQ ID NO: 1394 - DNA, 1338 bp, Artificial Sequence
  Synthetic: HC Ab50
gaagtgcagctgctggaaagcggcggcggcgtggtgcagccgggccgtagcctgcgtctgagctgcgcggcgagcggctttacctttagcagctatgcgatgcattgggtgcgtcaggcgccgggcaaaggcctggaatgggtggcggtgattagctatgatggcagcaacaaatattatgcggatagcgtgaaaggccgttttaccattagccgtgataacagcaaaaacaccctgagcctgcagatgaacagcctgcgtgtggaagataccgcgatttattattgcgtgcgtggcgcgggcctgggctttccgtttggcccggatggctttgatatttggggccagggcaccatggtgaccgtgagcagcaagggaccctcggtgttccctctcgccccctcatcgaggagcacgtccgaatcgactgcggcgctgggatgtctcgtgaaggactacttccccgagcccgtgaccgtgtcatggaactcaggcgcattgacctcgggagtgcacacgttcccggcagtgttgcagtcgtcgggcctttactcgctgtcgtccgtggtcacggtgccttcgtcgaatttcgggacgcagacttacacatgtaatgtggatcacaaaccgtccaataccaaggtcgataagacggtcgaaaggaaatgctgcgtggaatgtcctccctgcccagcaccgccagtcgcgggtcccagcgtctttttgttcccaccgaagcccaaggacacactgatgatcagccgtacgccggaggtaacatgcgtagtggtagatgtctcgcatgaggaccctgaagtgcagttcaattggtatgtagacggcgtggaggtgcacaacgccaagaccaagccacgagaagaacagttcaactcgacttttagagtggtatccgtcctgaccgtcgtgcaccaggactggctcaatggaaaggagtacaaatgcaaggtatccaacaaggggttgccagctccaatcgaaaagaccatctcaaagacaaaggggcagcccagagagccccaagtgtatacgcttccaccctcaagggaggagatgacaaagaatcaggtatcactcacatgtttggtgaaagggttttatccgagcgatattgcggtcgagtgggaaagcaacggtcaaccggagaacaactataagacgactccccctatgctggacagcgacgggtcgttctttctgtattccaaactcacggtggacaaatcgaggtggcagcaaggaaacgtattctcatgctcagtaatgcacgaggccctccataatcattacacgcagaaatcattaagcttatcgccgggt

SEQ ID NO: 1395 - DNA, 1338 bp, Artificial Sequence
  Synthetic: HC Ab51
gaagtgcagctgctggaaagcggcggcggcgtggtgcagccgggccgtagcctgcgtctgagctgcgcggcgagcggctttacctttagcagctatgcgatgcattgggtgcgtcaggcgccgggcaaaggcctggaatgggtggcggtgattagctatgatggcagcaacaaatattatgcggatagcgtgaaaggccgttttaccattagccgtgataacagcaaaaacaccctgagcctgcagatgaacagcctgcgtgtggaagataccgcgatttattattgcgtgcgtggcgcgggccgtggctttccgtatggcccggatggctttgatatttggggccagggcaccatggtgaccgtgagcagcaagggaccctcggtgttccctctcgccccctcatcgaggagcacgtccgaatcgactgcggcgctgggatgtctcgtgaaggactacttccccgagcccgtgaccgtgtcatggaactcaggcgcattgacctcgggagtgcacacgttcccggcagtgttgcagtcgtcgggcctttactcgctgtcgtccgtggtcacggtgccttcgtcgaatttcgggacgcagacttacacatgtaatgtggatcacaaaccgtccaataccaaggtcgataagacggtcgaaaggaaatgctgcgtggaatgtcctccctgcccagcaccgccagtcgcgggtcccagcgtctttttgttcccaccgaagcccaaggacacactgatgatcagccgtacgccggaggtaacatgcgtagtggtagatgtctcgcatgaggaccctgaagtgcagttcaattggtatgtagacggcgtggaggtgcacaacgccaagaccaagccacgagaagaacagttcaactcgacttttagagtggtatccgtcctgaccgtcgtgcaccaggactggctcaatggaaaggagtacaaatgcaaggtatccaacaaggggttgccagctccaatcgaaaagaccatctcaaagacaaaggggcagcccagagagccccaagtgtatacgcttccaccctcaagggaggagatgacaaagaatcaggtatcactcacatgtttggtgaaagggttttatccgagcgatattgcggtcgagtgggaaagcaacggtcaaccggagaacaactataagacgactccccctatgctggacagcgacgggtcgttctttctgtattccaaactcacggtggacaaatcgaggtggcagcaaggaaacgtattctcatgctcagtaatgcacgaggccctccataatcattacacgcagaaatcattaagcttatcgccgggt

SEQ ID NO: 1396 - DNA, 1338 bp, Artificial Sequence
  Synthetic: HC Ab52
gaagtgcagctgctggaaagcggcggcggcgtggtgcagccgggccgtagcctgcgtctgagctgcgcggcgagcggctttacctttagcagctatgcgatgcattgggtgcgtcaggcgccgggcaaaggcctggaatgggtggcggtgattagctatgatggcagcaacaaatattatgcggatagcgtgaaaggccgttttaccattagccgtgataacagcaaaaacaccctgagcctgcagatgaacagcctgcgtgtggaagataccgcgatttattattgcgtgcgtggcgcgggcctgggctatccgaacggcccggatggctttgatatttggggccagggcaccatggtgaccgtgagcagcaagggaccctcggtgttccctctcgccccctcatcgaggagcacgtccgaatcgactgcggcgctgggatgtctcgtgaaggactacttccccgagcccgtgaccgtgtcatggaactcaggcgcattgacctcgggagtgcacacgttcccggcagtgttgcagtcgtcgggcctttactcgctgtcgtccgtggtcacggtgccttcgtcgaatttcgggacgcagacttacacatgtaatgtggatcacaaaccgtccaataccaaggtcgataagacggtcgaaaggaaatgctgcgtggaatgtcctccctgcccagcaccgccagtcgcgggtcccagcgtctttttgttcccaccgaagcccaaggacacactgatgatcagccgtacgccggaggtaacatgcgtagtggtagatgtctcgcatgaggaccctgaagtgcagttcaattggtatgtagacggcgtggaggtgcacaacgccaagaccaagccacgagaagaacagttcaactcgacttttagagtggtatccgtcctgaccgtcgtgcaccaggactggctcaatggaaaggagtacaaatgcaaggtatccaacaaggggttgccagctccaatcgaaaagaccatctcaaagacaaaggggcagcccagagagccccaagtgtatacgcttccaccctcaagggaggagatgacaaagaatcaggtatcactcacatgtttggtgaaagggttttatccgagcgatattgcggtcgagtgggaaagcaacggtcaaccggagaacaactataagacgactccccctatgctggacagcgacgggtcgttctttctgtattccaaactcacggtggacaaatcgaggtggcagcaaggaaacgtattctcatgctcagtaatgcacgaggccctccataatcattacacgcagaaatcattaagcttatcgccgggt

SEQ ID NO: 1397 - DNA, 1338 bp, Artificial Sequence
  Synthetic: HC Ab53
gaagtgcagctgctggaaagcggcggcggcgtggtgcagccgggccgtagcctgcgtctgagctgcgcggcgagcggctttacctttagcagctatgcgatgcattgggtgcgtcaggcgccgggcaaaggcctggaatgggtggcggtgattagctatgatggcagcaacaaatattatgcggatagcgtgaaaggccgttttaccattagccgtgataacagcaaaaacaccctgagcctgcagatgaacagcctgcgtgtggaagataccgcgatttattattgcgtgcgtggcgcgggccagggctttccgtatggcccggatggctttgatatttggggccagggcaccatggtgaccgtgagcagcaagggaccctcggtgttccctctcgccccctcatcgaggagcacgtccgaatcgactgcggcgctgggatgtctcgtgaaggactacttccccgagcccgtgaccgtgtcatggaactcaggcgcattgacctcgggagtgcacacgttcccggcagtgttgcagtcgtcgggcctttactcgctgtcgtccgtggtcacggtgccttcgtcgaatttcgggacgcagacttacacatgtaatgtggatcacaaaccgtccaataccaaggtcgataagacggtcgaaaggaaatgctgcgtggaatgtcctccctgcccagcaccgccagtcgcgggtcccagcgtctttttgttcccaccgaagcccaaggacacactgatgatcagccgtacgccggaggtaacatgcgtagtggtagatgtctcgcatgaggaccctgaagtgcagttcaattggtatgtagacggcgtggaggtgcacaacgccaagaccaagccacgagaagaacagttcaactcgacttttagagtggtatccgtcctgaccgtcgtgcaccaggactggctcaatggaaaggagtacaaatgcaaggtatccaacaaggggttgccagctccaatcgaaaagaccatctcaaagacaaaggggcagcccagagagccccaagtgtatacgcttccaccctcaagggaggagatgacaaagaatcaggtatcactcacatgtttggtgaaagggttttatccgagcgatattgcggtcgagtgggaaagcaacggtcaaccggagaacaactataagacgactccccctatgctggacagcgacgggtcgttctttctgtattccaaactcacggtggacaaatcgaggtggcagcaaggaaacgtattctcatgctcagtaatgcacgaggccctccataatcattacacgcagaaatcattaagcttatcgccgggt

SEQ ID NO: 1398 - DNA, 1338 bp, Artificial Sequence; identical to SEQ ID NO: 1382
  Synthetic: HC Ab54

SEQ ID NO: 1399 - DNA, 1338 bp, Artificial Sequence; identical to SEQ ID NO: 1383
  Synthetic: HC Ab55

SEQ ID NO: 1400 - DNA, 1338 bp, Artificial Sequence; identical to SEQ ID NO: 1384
  Synthetic: HC Ab56

SEQ ID NO: 1401 - DNA, 1338 bp, Artificial Sequence; identical to SEQ ID NO: 1385
  Synthetic: HC Ab57

SEQ ID NO: 1402 - DNA, 1338 bp, Artificial Sequence; identical to SEQ ID NO: 1386
  Synthetic: HC Ab58

SEQ ID NO: 1403 - DNA, 1338 bp, Artificial Sequence; identical to SEQ ID NO: 1387
  Synthetic: HC Ab59

SEQ ID NO: 1404 - DNA, 1338 bp, Artificial Sequence; identical to SEQ ID NO: 1388
  Synthetic: HC Ab60

SEQ ID NO: 1405 - DNA, 1338 bp, Artificial Sequence; identical to SEQ ID NO: 1389
  Synthetic: HC Ab61

SEQ ID NO: 1406 - DNA, 1338 bp, Artificial Sequence; identical to SEQ ID NO: 1390
  Synthetic: HC Ab62

SEQ ID NO: 1407 - DNA, 1338 bp, Artificial Sequence; identical to SEQ ID NO: 1391
  Synthetic: HC Ab63

SEQ ID NO: 1408 - DNA, 1338 bp, Artificial Sequence; identical to SEQ ID NO: 1392
  Synthetic: HC Ab64

SEQ ID NO: 1409 - DNA, 1338 bp, Artificial Sequence; identical to SEQ ID NO: 1387
  Synthetic: HC Ab65

SEQ ID NO: 1410 - DNA, 1338 bp, Artificial Sequence; identical to SEQ ID NO: 1394
  Synthetic: HC Ab66

SEQ ID NO: 1411 - DNA, 1338 bp, Artificial Sequence; identical to SEQ ID NO: 1395
  Synthetic: HC Ab67

SEQ ID NO: 1412 - DNA, 1338 bp, Artificial Sequence; identical to SEQ ID NO: 1396
  Synthetic: HC Ab68

SEQ ID NO: 1413 - DNA, 1338 bp, Artificial Sequence; identical to SEQ ID NO: 1397
  Synthetic: HC Ab69

SEQ ID NO: 1414 - DNA, 1338 bp, Artificial Sequence; identical to SEQ ID NO: 1382
  Synthetic: HC Ab70

SEQ ID NO: 1415 - DNA, 1338 bp, Artificial Sequence; identical to SEQ ID NO: 1383
  Synthetic: HC Ab71

SEQ ID NO: 1416 - DNA, 1338 bp, Artificial Sequence; identical to SEQ ID NO: 1384
  Synthetic: HC Ab72

SEQ ID NO: 1417 - DNA, 1338 bp, Artificial Sequence; identical to SEQ ID NO: 1385
  Synthetic: HC Ab73

SEQ ID NO: 1418 - DNA, 1338 bp, Artificial Sequence; identical to SEQ ID NO: 1386
  Synthetic: HC Ab74

SEQ ID NO: 1419 - DNA, 1338 bp, Artificial Sequence; identical to SEQ ID NO: 1387
  Synthetic: HC Ab75

SEQ ID NO: 1420 - DNA, 1338 bp, Artificial Sequence; identical to SEQ ID NO: 1388
  Synthetic: HC Ab76

SEQ ID NO: 1421 - DNA, 1338 bp, Artificial Sequence; identical to SEQ ID NO: 1389
  Synthetic: HC Ab77

SEQ ID NO: 1422 - DNA, 1338 bp, Artificial Sequence; identical to SEQ ID NO: 1390
  Synthetic: HC Ab78

SEQ ID NO: 1423 - DNA, 1338 bp, Artificial Sequence; identical to SEQ ID NO: 1391
  Synthetic: HC Ab79

SEQ ID NO: 1424 - DNA, 1338 bp, Artificial Sequence; identical to SEQ ID NO: 1392
  Synthetic: HC Ab80

SEQ ID NO: 1425 - DNA, 1338 bp, Artificial Sequence; identical to SEQ ID NO: 1387
  Synthetic: HC Ab81

SEQ ID NO: 1426 - DNA, 1338 bp, Artificial Sequence; identical to SEQ ID NO: 1394
  Synthetic: HC Ab82

SEQ ID NO: 1427 - DNA, 1338 bp, Artificial Sequence; identical to SEQ ID NO: 1395
  Synthetic: HC Ab83

SEQ ID NO: 1428 - DNA, 1338 bp, Artificial Sequence; identical to SEQ ID NO: 1396
  Synthetic: HC Ab84

SEQ ID NO: 1429 - DNA, 1338 bp, Artificial Sequence; identical to SEQ ID NO: 1397
  Synthetic: HC Ab85

SEQ ID NO: 1430 - DNA, 1338 bp, Artificial Sequence; identical to SEQ ID NO: 1367
  Synthetic: HC Ab86

SEQ ID NO: 1431 - DNA, 1338 bp, Artificial Sequence; identical to SEQ ID NO: 1362
  Synthetic: HC Ab87

SEQ ID NO: 1432 - DNA, 1338 bp, Artificial Sequence; identical to SEQ ID NO: 1367
  Synthetic: HC Ab88

SEQ ID NO: 1433 - DNA, 1338 bp, Artificial Sequence; identical to SEQ ID NO: 1395
  Synthetic: HC Ab89

SEQ ID NO: 1434 - DNA, 1338 bp, Artificial Sequence; identical to SEQ ID NO: 1387
  Synthetic: HC Ab90

SEQ ID NO: 1435 - DNA, 1338 bp, Artificial Sequence
  Synthetic: HC Ab91
gaagtgcagctgctggaaagcggcggcggcgtggtgcagccgggccgtagcctgcgtctgagctgcgcggcgagcggctttacctttagcagctatgcgatgcattgggtgcgtcaggcgccgggcaaaggcctggaatgggtggcggtgattagctatgatggcagcaacaaatattatgcggatagcgtgaaaggccgttttaccattagccgtgataacagcaaaaacaccctgagcctgcagatgaacagcctgcgtgtggaagataccgcgatttattattgcgtgcgtggcgcgggccagggctatatgcatggcccggatggctttgatatttggggccagggcaccatggtgaccgtgagcagcaagggaccctcggtgttccctctcgccccctcatcgaggagcacgtccgaatcgactgcggcgctgggatgtctcgtgaaggactacttccccgagcccgtgaccgtgtcatggaactcaggcgcattgacctcgggagtgcacacgttcccggcagtgttgcagtcgtcgggcctttactcgctgtcgtccgtggtcacggtgccttcgtcgaatttcgggacgcagacttacacatgtaatgtggatcacaaaccgtccaataccaaggtcgataagacggtcgaaaggaaatgctgcgtggaatgtcctccctgcccagcaccgccagtcgcgggtcccagcgtctttttgttcccaccgaagcccaaggacacactgatgatcagccgtacgccggaggtaacatgcgtagtggtagatgtctcgcatgaggaccctgaagtgcagttcaattggtatgtagacggcgtggaggtgcacaacgccaagaccaagccacgagaagaacagttcaactcgacttttagagtggtatccgtcctgaccgtcgtgcaccaggactggctcaatggaaaggagtacaaatgcaaggtatccaacaaggggttgccagctccaatcgaaaagaccatctcaaagacaaaggggcagcccagagagccccaagtgtatacgcttccaccctcaagggaggagatgacaaagaatcaggtatcactcacatgtttggtgaaagggttttatccgagcgatattgcggtcgagtgggaaagcaacggtcaaccggagaacaactataagacgactccccctatgctggacagcgacgggtcgttctttctgtattccaaactcacggtggacaaatcgaggtggcagcaaggaaacgtattctcatgctcagtaatgcacgaggccctccataatcattacacgcagaaatcattaagcttatcgccgggt

SEQ ID NO: 1436 - DNA, 1338 bp, Artificial Sequence
  Synthetic: HC Ab92
gaagtgcagctgctggaaagcggcggcggcgtggtgcagccgggccgtagcctgcgtctgagctgcgcggcgagcggctttacctttagcagctatgcgatgcattgggtgcgtcaggcgccgggcaaaggcctggaatgggtggcggtgattagctatgatggcagcaacaaatattatgcggatagcgtgaaaggccgttttaccattagccgtgataacagcaaaaacaccctgagcctgcagatgaacagcctgcgtgtggaagataccgcgatttattattgcgtgcgtggcgcgggccatggctttccgaccggcccggatggctttgatatttggggccagggcaccatggtgaccgtgagcagcaagggaccctcggtgttccctctcgccccctcatcgaggagcacgtccgaatcgactgcggcgctgggatgtctcgtgaaggactacttccccgagcccgtgaccgtgtcatggaactcaggcgcattgacctcgggagtgcacacgttcccggcagtgttgcagtcgtcgggcctttactcgctgtcgtccgtggtcacggtgccttcgtcgaatttcgggacgcagacttacacatgtaatgtggatcacaaaccgtccaataccaaggtcgataagacggtcgaaaggaaatgctgcgtggaatgtcctccctgcccagcaccgccagtcgcgggtcccagcgtctttttgttcccaccgaagcccaaggacacactgatgatcagccgtacgccggaggtaacatgcgtagtggtagatgtctcgcatgaggaccctgaagtgcagttcaattggtatgtagacggcgtggaggtgcacaacgccaagaccaagccacgagaagaacagttcaactcgacttttagagtggtatccgtcctgaccgtcgtgcaccaggactggctcaatggaaaggagtacaaatgcaaggtatccaacaaggggttgccagctccaatcgaaaagaccatctcaaagacaaaggggcagcccagagagccccaagtgtatacgcttccaccctcaagggaggagatgacaaagaatcaggtatcactcacatgtttggtgaaagggttttatccgagcgatattgcggtcgagtgggaaagcaacggtcaaccggagaacaactataagacgactccccctatgctggacagcgacgggtcgttctttctgtattccaaactcacggtggacaaatcgaggtggcagcaaggaaacgtattctcatgctcagtaatgcacgaggccctccataatcattacacgcagaaatcattaagcttatcgccgggt

SEQ ID NO: 1437 - DNA, 1338 bp, Artificial Sequence; identical to SEQ ID NO: 1385
  Synthetic: HC Ab93

SEQ ID NO: 1438 - DNA, 1338 bp, Artificial Sequence; identical to SEQ ID NO: 1365
  Synthetic: HC Ab94

SEQ ID NO: 1439 - DNA, 1338 bp, Artificial Sequence; identical to SEQ ID NO: 1365
  Synthetic: HC Ab95

SEQ ID NO: 1440 - DNA, 1338 bp, Artificial Sequence; identical to SEQ ID NO: 1365
  Synthetic: HC Ab96

SEQ ID NO: 1441 - DNA, 1338 bp, Artificial Sequence; identical to SEQ ID NO: 1365
  Synthetic: HC Ab97

SEQ ID NO: 1442 - DNA, 1338 bp, Artificial Sequence; identical to SEQ ID NO: 1365
  Synthetic: HC Ab98

SEQ ID NO: 1443 - DNA, 1338 bp, Artificial Sequence; identical to SEQ ID NO: 1365
  Synthetic: HC Ab99

SEQ ID NO: 1444 - DNA, 1338 bp, Artificial Sequence; identical to SEQ ID NO: 1365
  Synthetic: HC Ab100

SEQ ID NO: 1445 - DNA, 1338 bp, Artificial Sequence; identical to SEQ ID NO: 1363
  Synthetic: HC Ab101

SEQ ID NO: 1446 - DNA, 1338 bp, Artificial Sequence; identical to SEQ ID NO: 1363
  Synthetic: HC Ab102

SEQ ID NO: 1447 - DNA, 1338 bp, Artificial Sequence; identical to SEQ ID NO: 1363
  Synthetic: HC Ab103

SEQ ID NO: 1448 - DNA, 1338 bp, Artificial Sequence; identical to SEQ ID NO: 1363
  Synthetic: HC Ab104

SEQ ID NO: 1449 - DNA, 1338 bp, Artificial Sequence; identical to SEQ ID NO: 1363
  Synthetic: HC Ab105

SEQ ID NO: 1450 - DNA, 1338 bp, Artificial Sequence; identical to SEQ ID NO: 1363
  Synthetic: HC Ab106

SEQ ID NO: 1451 - DNA, 1338 bp, Artificial Sequence; identical to SEQ ID NO: 1363
  Synthetic: HC Ab107

SEQ ID NO: 1452 - DNA, 657 bp, Artificial Sequence
  Synthetic: LC Ab16
gatattgtgatgacccagaccccgctgagcctgagcgtgaccccgggccagccggcgagcattagctgcaaaagcagccgtagcctgctgcatagcgatggcaaaacctatgtgtattggtatgtgcagaaaagcggccagccgccgcagctgctgatttatgaactgagcaaccgttttagcggcgtgccggatcgttttagcggcagcggcagccgtaccgattttaccctgaaaattagccgtgtggaagcggaagatgtgggcgtgtattattgcatgcagtatattgaagcgccgctgacctttggcggcggcaccaaagtggaaattaaacgtacggtggcggcgcccagtgtattcatcttccctccctccgacgagcagttgaagtcggggaccgcgtcagtcgtgtgcctgctcaataacttttacccgcgagaggctaaggtccagtggaaagtggataatgcgctgcaaagcggaaactcccaagaatcagtgacggaacaagactcaaaagactcgacgtattcgctctcatcgacgctcacgctttcaaaagcagattacgagaagcacaaggtgtatgcatgtgaagtgacacaccagggtttgtcgtcgccagtcaccaagtcattcaaccgcggagagtgc

SEQ ID NO: 1453 - DNA, 657 bp, Artificial Sequence; identical to SEQ ID NO: 1452
  Synthetic: LC Ab17

SEQ ID NO: 1454 - DNA, 657 bp, Artificial Sequence; identical to SEQ ID NO: 1452
  Synthetic: LC Ab18

SEQ ID NO: 1455 - DNA, 657 bp, Artificial Sequence; identical to SEQ ID NO: 1452
  Synthetic: LC Ab19

SEQ ID NO: 1456 - DNA, 657 bp, Artificial Sequence; identical to SEQ ID NO: 1452
  Synthetic: LC Ab20

SEQ ID NO: 1457 - DNA, 657 bp, Artificial Sequence; identical to SEQ ID NO: 1452
  Synthetic: LC Ab21

SEQ ID NO: 1458 - DNA, 657 bp, Artificial Sequence; identical to SEQ ID NO: 1452
  Synthetic: LC Ab22

SEQ ID NO: 1459 - DNA, 657 bp, Artificial Sequence; identical to SEQ ID NO: 1452
  Synthetic: LC Ab23

SEQ ID NO: 1460 - DNA, 657 bp, Artificial Sequence; identical to SEQ ID NO: 1452
  Synthetic: LC Ab24

SEQ ID NO: 1461 - DNA, 657 bp, Artificial Sequence; identical to SEQ ID NO: 1452
  Synthetic: LC Ab25

SEQ ID NO: 1462 - DNA, 657 bp, Artificial Sequence; identical to SEQ ID NO: 1452
  Synthetic: LC Ab26

SEQ ID NO: 1463 - DNA, 657 bp, Artificial Sequence; identical to SEQ ID NO: 1452
  Synthetic: LC Ab27

SEQ ID NO: 1464 - DNA, 657 bp, Artificial Sequence; identical to SEQ ID NO: 1452
  Synthetic: LC Ab28

SEQ ID NO: 1465 - DNA, 657 bp, Artificial Sequence
  Synthetic: LC Ab29
gatattgtgatgacccagaccccgctgagcctgagcgtgaccccgggccagccggcgagcattagctgcaccagcagccgtagcctgctgcatagcgatggcaaaacctatgtgtattggtatgtgcagaaaagcggccagccgccgcagctgctgatttatgaactgagcaaccgttttagcggcgtgccggatcgttttagcggcagcggcagccgtaccgattttaccctgaaaattagccgtgtggaagcggaagatgtgggcgtgtattattgcatgcagtatgtggaagcgccgctgacctttggcggcggcaccaaagtggaaattaaacgtacggtggcggcgcccagtgtattcatcttccctccctccgacgagcagttgaagtcggggaccgcgtcagtcgtgtgcctgctcaataacttttacccgcgagaggctaaggtccagtggaaagtggataatgcgctgcaaagcggaaactcccaagaatcagtgacggaacaagactcaaaagactcgacgtattcgctctcatcgacgctcacgctttcaaaagcagattacgagaagcacaaggtgtatgcatgtgaagtgacacaccagggtttgtcgtcgccagtcaccaagtcattcaaccgcggagagtgc

SEQ ID NO: 1466 - DNA, 657 bp, Artificial Sequence; identical to SEQ ID NO: 1465
  Synthetic: LC Ab30

SEQ ID NO: 1467 - DNA, 657 bp, Artificial Sequence; identical to SEQ ID NO: 1465
  Synthetic: LC Ab31

SEQ ID NO: 1468 - DNA, 657 bp, Artificial Sequence; identical to SEQ ID NO: 1465
  Synthetic: LC Ab32

SEQ ID NO: 1469 - DNA, 657 bp, Artificial Sequence; identical to SEQ ID NO: 1465
  Synthetic: LC Ab33

SEQ ID NO: 1470 - DNA, 657 bp, Artificial Sequence; identical to SEQ ID NO: 1465
  Synthetic: LC Ab34

SEQ ID NO: 1471 - DNA, 657 bp, Artificial Sequence; identical to SEQ ID NO: 1465
  Synthetic: LC Ab35

SEQ ID NO: 1472 - DNA, 657 bp, Artificial Sequence
  Synthetic: LC Ab36
gatattgtgatgacccagaccccgctgagcctgagcgtgaccccgggccagccggcgagcattagctgccgtagcagccgtagcctgctgcatagcgatggcaaaacctatgtgtattggtatgtgcagaaaagcggccagccgccgcagctgctgatttatgaactgagcaaccgttttagcggcgtgccggatcgttttagcggcagcggcagccgtaccgattttaccctgaaaattagccgtgtggaagcggaagatgtgggcgtgtattattgcatgcagtatattgaagcgccgctgacctttggcggcggcaccaaagtggaaattaaacgtacggtggcggcgcccagtgtattcatcttccctccctccgacgagcagttgaagtcggggaccgcgtcagtcgtgtgcctgctcaataacttttacccgcgagaggctaaggtccagtggaaagtggataatgcgctgcaaagcggaaactcccaagaatcagtgacggaacaagactcaaaagactcgacgtattcgctctcatcgacgctcacgctttcaaaagcagattacgagaagcacaaggtgtatgcatgtgaagtgacacaccagggtttgtcgtcgccagtcaccaagtcattcaaccgcggagagtgc

SEQ ID NO: 1473 - DNA, 657 bp, Artificial Sequence; identical to SEQ ID NO: 1472
  Synthetic: LC Ab37

SEQ ID NO: 1474 - DNA, 657 bp, Artificial Sequence; identical to SEQ ID NO: 1472
  Synthetic: LC Ab38

SEQ ID NO: 1475 - DNA, 657 bp, Artificial Sequence; identical to SEQ ID NO: 1472
  Synthetic: LC Ab39

SEQ ID NO: 1476 - DNA, 657 bp, Artificial Sequence; identical to SEQ ID NO: 1472
  Synthetic: LC Ab40

SEQ ID NO: 1477 - DNA, 657 bp, Artificial Sequence; identical to SEQ ID NO: 1472
  Synthetic: LC Ab41

SEQ ID NO: 1478 - DNA, 657 bp, Artificial Sequence; identical to SEQ ID NO: 1472
  Synthetic: LC Ab42

SEQ ID NO: 1479 - DNA, 657 bp, Artificial Sequence; identical to SEQ ID NO: 1472
  Synthetic: LC Ab43

SEQ ID NO: 1480 - DNA, 657 bp, Artificial Sequence; identical to SEQ ID NO: 1472
  Synthetic: LC Ab44

SEQ ID NO: 1481 - DNA, 657 bp, Artificial Sequence; identical to SEQ ID NO: 1472
  Synthetic: LC Ab45

SEQ ID NO: 1482 - DNA, 657 bp, Artificial Sequence; identical to SEQ ID NO: 1472
  Synthetic: LC Ab46

SEQ ID NO: 1483 - DNA, 657 bp, Artificial Sequence; identical to SEQ ID NO: 1472
  Synthetic: LC Ab47

SEQ ID NO: 1484 - DNA, 657 bp, Artificial Sequence; identical to SEQ ID NO: 1472
  Synthetic: LC Ab48

SEQ ID NO: 1485 - DNA, 657 bp, Artificial Sequence; identical to SEQ ID NO: 1472
  Synthetic: LC Ab49

SEQ ID NO: 1486 - DNA, 657 bp, Artificial Sequence; identical to SEQ ID NO: 1472
  Synthetic: LC Ab50

SEQ ID NO: 1487 - DNA, 657 bp, Artificial Sequence; identical to SEQ ID NO: 1472
  Synthetic: LC Ab51

SEQ ID NO: 1488 - DNA, 657 bp, Artificial Sequence; identical to SEQ ID NO: 1472
  Synthetic: LC Ab52

SEQ ID NO: 1489 - DNA, 657 bp, Artificial Sequence; identical to SEQ ID NO: 1472
  Synthetic: LC Ab53

SEQ ID NO: 1490 - DNA, 657 bp, Artificial Sequence
  Synthetic: LC Ab54
gatattgtgatgacccagaccccgctgagcctgagcgtgaccccgggccagccggcgagcattagctgcaccagcagccgtagcctgctgcatagcgatggcaaaacctatgtgtattggtatgtgcagaaaagcggccagccgccgcagctgctgatttatgaactgagcaaccgttttagcggcgtgccggatcgttttagcggcagcggcagccgtaccgattttaccctgaaaattagccgtgtggaagcggaagatgtgggcgtgtattattgcatgcagtatattgaagcgccgctgacctttggcggcggcaccaaagtggaaattaaacgtacggtggcggcgcccagtgtattcatcttccctccctccgacgagcagttgaagtcggggaccgcgtcagtcgtgtgcctgctcaataacttttacccgcgagaggctaaggtccagtggaaagtggataatgcgctgcaaagcggaaactcccaagaatcagtgacggaacaagactcaaaagactcgacgtattcgctctcatcgacgctcacgctttcaaaagcagattacgagaagcacaaggtgtatgcatgtgaagtgacacaccagggtttgtcgtcgccagtcaccaagtcattcaaccgcggagagtgc

SEQ ID NO: 1491 - DNA, 657 bp, Artificial Sequence; identical to SEQ ID NO: 1490
  Synthetic: LC Ab55

SEQ ID NO: 1492 - DNA, 657 bp, Artificial Sequence; identical to SEQ ID NO: 1490
  Synthetic: LC Ab56

SEQ ID NO: 1493 - DNA, 657 bp, Artificial Sequence; identical to SEQ ID NO: 1490
  Synthetic: LC Ab57

SEQ ID NO: 1494 - DNA, 657 bp, Artificial Sequence; identical to SEQ ID NO: 1490
  Synthetic: LC Ab58

SEQ ID NO: 1495 - DNA, 657 bp, Artificial Sequence; identical to SEQ ID NO: 1490
  Synthetic: LC Ab59

SEQ ID NO: 1496 - DNA, 657 bp, Artificial Sequence; identical to SEQ ID NO: 1490
  Synthetic: LC Ab60

SEQ ID NO: 1497 - DNA, 657 bp, Artificial Sequence; identical to SEQ ID NO: 1490
  Synthetic: LC Ab61

SEQ ID NO: 1498 - DNA, 657 bp, Artificial Sequence; identical to SEQ ID NO: 1490
  Synthetic: LC Ab62

SEQ ID NO: 1499 - DNA, 657 bp, Artificial Sequence; identical to SEQ ID NO: 1490
  Synthetic: LC Ab63

SEQ ID NO: 1500 - DNA, 657 bp, Artificial Sequence; identical to SEQ ID NO: 1490
  Synthetic: LC Ab64

SEQ ID NO: 1501 - DNA, 657 bp, Artificial Sequence; identical to SEQ ID NO: 1490
  Synthetic: LC Ab65

SEQ ID NO: 1502 - DNA, 657 bp, Artificial Sequence; identical to SEQ ID NO: 1490
  Synthetic: LC Ab66

SEQ ID NO: 1503 - DNA, 657 bp, Artificial Sequence; identical to SEQ ID NO: 1490
  Synthetic: LC Ab67

SEQ ID NO: 1504 - DNA, 657 bp, Artificial Sequence; identical to SEQ ID NO: 1490
  Synthetic: LC Ab68

SEQ ID NO: 1505 - DNA, 657 bp, Artificial Sequence; identical to SEQ ID NO: 1490
  Synthetic: LC Ab69

SEQ ID NO: 1506 - DNA, 657 bp, Artificial Sequence; identical to SEQ ID NO: 1452
  Synthetic: LC Ab70

SEQ ID NO: 1507 - DNA, 657 bp, Artificial Sequence; identical to SEQ ID NO: 1452
  Synthetic: LC Ab71

SEQ ID NO: 1508 - DNA, 657 bp, Artificial Sequence; identical to SEQ ID NO: 1452
  Synthetic: LC Ab72

SEQ ID NO: 1509 - DNA, 657 bp, Artificial Sequence; identical to SEQ ID NO: 1452
  Synthetic: LC Ab73

SEQ ID NO: 1510 - DNA, 657 bp, Artificial Sequence; identical to SEQ ID NO: 1452
  Synthetic: LC Ab74

SEQ ID NO: 1511 - DNA, 657 bp, Artificial Sequence; identical to SEQ ID NO: 1452
  Synthetic: LC Ab75

SEQ ID NO: 1512 - DNA, 657 bp, Artificial Sequence; identical to SEQ ID NO: 1452
  Synthetic: LC Ab76

SEQ ID NO: 1513 - DNA, 657 bp, Artificial Sequence; identical to SEQ ID NO: 1452
  Synthetic: LC Ab77

SEQ ID NO: 1514 - DNA, 657 bp, Artificial Sequence; identical to SEQ ID NO: 1452
  Synthetic: LC Ab78

SEQ ID NO: 1515 - DNA, 657 bp, Artificial Sequence; identical to SEQ ID NO: 1452
  Synthetic: LC Ab79

SEQ ID NO: 1516 - DNA, 657 bp, Artificial Sequence; identical to SEQ ID NO: 1452
  Synthetic: LC Ab80

SEQ ID NO: 1517 - DNA, 657 bp, Artificial Sequence; identical to SEQ ID NO: 1452
  Synthetic: LC Ab81

SEQ ID NO: 1518 - DNA, 657 bp, Artificial Sequence; identical to SEQ ID NO: 1452
  Synthetic: LC Ab82

SEQ ID NO: 1519 - DNA, 657 bp, Artificial Sequence; identical to SEQ ID NO: 1452
  Synthetic: LC Ab83

SEQ ID NO: 1520 - DNA, 657 bp, Artificial Sequence; identical to SEQ ID NO: 1452
  Synthetic: LC Ab84

SEQ ID NO: 1521 - DNA, 657 bp, Artificial Sequence; identical to SEQ ID NO: 1452
  Synthetic: LC Ab85

SEQ ID NO: 1522 - DNA, 657 bp, Artificial Sequence
  Synthetic: LC Ab86
gatattgtgatgacccagaccccgctgagcctgagcgtgaccccgggccagccggcgagcattagctgcaaaagcagccgtagcctgctgtggagcgatggcaaaacctatgtgtattggtatgtgcagaaaagcggccagccgccgcagctgctgatttatgaactgagcaaccgttttagcggcgtgccggatcgttttagcggcagcggcagccgtaccgattttaccctgaaaattagccgtgtggaagcggaagatgtgggcgtgtattattgcatgcagtatattgaagcgccgctgacctttggcggcggcaccaaagtggaaattaaacgtacggtggcggcgcccagtgtattcatcttccctccctccgacgagcagttgaagtcggggaccgcgtcagtcgtgtgcctgctcaataacttttacccgcgagaggctaaggtccagtggaaagtggataatgcgctgcaaagcggaaactcccaagaatcagtgacggaacaagactcaaaagactcgacgtattcgctctcatcgacgctcacgctttcaaaagcagattacgagaagcacaaggtgtatgcatgtgaagtgacacaccagggtttgtcgtcgccagtcaccaagtcattcaaccgcggagagtgc

SEQ ID NO: 1523 - DNA, 657 bp, Artificial Sequence
  Synthetic: LC Ab87
gatattgtgatgacccagaccccgctgagcctgagcgtgaccccgggccagccggcgagcattagctgcaaaagcagccgtagcctgctgcatagcgatggcaaaacctatgtgtattggtatgtgcagaaaagcggccagccgccgcagctgctgatttatgaactgagcaaccgttttagcggcgtgccggatcgttttagcggcagcggcagccgtaccgattttaccctgaaaattagccgtgtggaagcggaagatgtgggcgtgtattattgcatgcagtatgtggaagcgccgctgacctttggcggcggcaccaaagtggaaattaaacgtacggtggcggcgcccagtgtattcatcttccctccctccgacgagcagttgaagtcggggaccgcgtcagtcgtgtgcctgctcaataacttttacccgcgagaggctaaggtccagtggaaagtggataatgcgctgcaaagcggaaactcccaagaatcagtgacggaacaagactcaaaagactcgacgtattcgctctcatcgacgctcacgctttcaaaagcagattacgagaagcacaaggtgtatgcatgtgaagtgacacaccagggtttgtcgtcgccagtcaccaagtcattcaaccgcggagagtgc

SEQ ID NO: 1524 - DNA, 657 bp, Artificial Sequence
  Synthetic: LC Ab88
gatattgtgatgacccagaccccgctgagcctgagcgtgaccccgggccagccggcgagcattagctgcaaaagcagccgtagcctgctgcatagcgatggcaaaacctatctgtattggtatgtgcagaaaagcggccagccgccgcagctgctgatttatgaactgagcaaccgttttagcggcgtgccggatcgttttagcggcagcggcagccgtaccgattttaccctgaaaattagccgtgtggaagcggaagatgtgggcgtgtattattgcatgcagtatattgaagcgccgctgacctttggcggcggcaccaaagtggaaattaaacgtacggtggcggcgcccagtgtattcatcttccctccctccgacgagcagttgaagtcggggaccgcgtcagtcgtgtgcctgctcaataacttttacccgcgagaggctaaggtccagtggaaagtggataatgcgctgcaaagcggaaactcccaagaatcagtgacggaacaagactcaaaagactcgacgtattcgctctcatcgacgctcacgctttcaaaagcagattacgagaagcacaaggtgtatgcatgtgaagtgacacaccagggtttgtcgtcgccagtcaccaagtcattcaaccgcggagagtgc

SEQ ID NO: 1525 - DNA, 657 bp, Artificial Sequence
  Synthetic: LC Ab89
gatattgtgatgacccagaccccgctgagcctgagcgtgaccccgggccagccggcgagcattagctgccgtagcagccgtagcctgctgcatagcgatggcaaaacctatgtgtattggtatgtgcagaaaagcggccagccgccgcagctgctgatttatgaactgagcaaccgttttagcggcgtgccggatcgttttagcggcagcggcagccgtaccgattttaccctgaaaattagccgtgtggaagcggaagatgtgggcgtgtattattgcatgcagtatattgaagtgccgctgacctttggcggcggcaccaaagtggaaattaaacgtacggtggcggcgcccagtgtattcatcttccctccctccgacgagcagttgaagtcggggaccgcgtcagtcgtgtgcctgctcaataacttttacccgcgagaggctaaggtccagtggaaagtggataatgcgctgcaaagcggaaactcccaagaatcagtgacggaacaagactcaaaagactcgacgtattcgctctcatcgacgctcacgctttcaaaagcagattacgagaagcacaaggtgtatgcatgtgaagtgacacaccagggtttgtcgtcgccagtcaccaagtcattcaaccgcggagagtgc

SEQ ID NO: 1526 - DNA, 657 bp, Artificial Sequence
  Synthetic: LC Ab90
gatattgtgatgacccagaccccgctgagcctgagcgtgaccccgggccagccggcgagcattagctgcaccagcagccgtagcctgctgcatagcgatggcaaaacctatgtgtattggtatgtgcagaaaagcggccagccgccgcagctgctgatttatgaactgagcaaccgttttagcggcgtgccggatcgttttagcggcagcggcagccgtaccgattttaccctgaaaattagccgtgtggaagcggaagatgtgggcgtgtattattgcatgcagtatgtggaagtgccgctgacctttggcggcggcaccaaagtggaaattaaacgtacggtggcggcgcccagtgtattcatcttccctccctccgacgagcagttgaagtcggggaccgcgtcagtcgtgtgcctgctcaataacttttacccgcgagaggctaaggtccagtggaaagtggataatgcgctgcaaagcggaaactcccaagaatcagtgacggaacaagactcaaaagactcgacgtattcgctctcatcgacgctcacgctttcaaaagcagattacgagaagcacaaggtgtatgcatgtgaagtgacacaccagggtttgtcgtcgccagtcaccaagtcattcaaccgcggagagtgc

SEQ ID NO: 1527 - DNA, 657 bp, Artificial Sequence
  Synthetic: LC Ab91
gatattgtgatgacccagaccccgctgagcctgagcgtgaccccgggccagccggcgagcattagctgccgtagcagccgtagcctgctgtggagcgatggcaaaacctatgtgtattggtatgtgcagaaaagcggccagccgccgcagctgctgatttatgaactgagcaaccgttttagcggcgtgccggatcgttttagcggcagcggcagccgtaccgattttaccctgaaaattagccgtgtggaagcggaagatgtgggcgtgtattattgcatgcagtatattgaagcgccgctgacctttggcggcggcaccaaagtggaaattaaacgtacggtggcggcgcccagtgtattcatcttccctccctccgacgagcagttgaagtcggggaccgcgtcagtcgtgtgcctgctcaataacttttacccgcgagaggctaaggtccagtggaaagtggataatgcgctgcaaagcggaaactcccaagaatcagtgacggaacaagactcaaaagactcgacgtattcgctctcatcgacgctcacgctttcaaaagcagattacgagaagcacaaggtgtatgcatgtgaagtgacacaccagggtttgtcgtcgccagtcaccaagtcattcaaccgcggagagtgc

SEQ ID NO: 1528 - DNA, 657 bp, Artificial Sequence
  Synthetic: LC Ab92
gatattgtgatgacccagaccccgctgagcctgagcgtgaccccgggccagccggcgagcattagctgccgtagcagccgtagcctgctgcatagcgatggcaaaacctatgtgtattggtatgtgcagaaaagcggccagccgccgcagctgctgatttatgaactgagcaaccgttttagcggcgtgccggatcgttttagcggcagcggcagccgtaccgattttaccctgaaaattagccgtgtggaagcggaagatgtgggcgtgtattattgcatgcagtatgtggaagcgccgctgacctttggcggcggcaccaaagtggaaattaaacgtacggtggcggcgcccagtgtattcatcttccctccctccgacgagcagttgaagtcggggaccgcgtcagtcgtgtgcctgctcaataacttttacccgcgagaggctaaggtccagtggaaagtggataatgcgctgcaaagcggaaactcccaagaatcagtgacggaacaagactcaaaagactcgacgtattcgctctcatcgacgctcacgctttcaaaagcagattacgagaagcacaaggtgtatgcatgtgaagtgacacaccagggtttgtcgtcgccagtcaccaagtcattcaaccgcggagagtgc

SEQ ID NO: 1529 - DNA, 657 bp, Artificial Sequence; identical to SEQ ID NO: 1524
  Synthetic: LC Ab93

SEQ ID NO: 1530 - DNA, 657 bp, Artificial Sequence; identical to SEQ ID NO: 1472
  Synthetic: LC Ab94

SEQ ID NO: 1531 - DNA, 657 bp, Artificial Sequence; identical to SEQ ID NO: 1490
  Synthetic: LC Ab95

SEQ ID NO: 1532 - DNA, 657 bp, Artificial Sequence; identical to SEQ ID NO: 1452
  Synthetic: LC Ab96

SEQ ID NO: 1533 - DNA, 657 bp, Artificial Sequence; identical to SEQ ID NO: 1523
  Synthetic: LC Ab97

SEQ ID NO: 1534 - DNA, 657 bp, Artificial Sequence; identical to SEQ ID NO: 1526
  Synthetic: LC Ab98

SEQ ID NO: 1535 - DNA, 657 bp, Artificial Sequence; identical to SEQ ID NO: 1527
  Synthetic: LC Ab99

SEQ ID NO: 1536 - DNA, 657 bp, Artificial Sequence
  Synthetic: LC Ab100
gatattgtgatgacccagaccccgctgagcctgagcgtgaccccgggccagccggcgagcattagctgcaaaagcagccgtagcctgctgtggagcgatggcaaaacctatgtgtattggtatgtgcagaaaagcggccagccgccgcagctgctgatttatgaactgagcaaccgttttagcggcgtgccggatcgttttagcggcagcggcagccgtaccgattttaccctgaaaattagccgtgtggaagcggaagatgtgggcgtgtattattgcatgcagtatgtggaagcgccgctgacctttggcggcggcaccaaagtggaaattaaacgtacggtggcggcgcccagtgtattcatcttccctccctccgacgagcagttgaagtcggggaccgcgtcagtcgtgtgcctgctcaataacttttacccgcgagaggctaaggtccagtggaaagtggataatgcgctgcaaagcggaaactcccaagaatcagtgacggaacaagactcaaaagactcgacgtattcgctctcatcgacgctcacgctttcaaaagcagattacgagaagcacaaggtgtatgcatgtgaagtgacacaccagggtttgtcgtcgccagtcaccaagtcattcaaccgcggagagtgc

SEQ ID NO: 1537 - DNA, 657 bp, Artificial Sequence; identical to SEQ ID NO: 1472
  Synthetic: LC Ab101

SEQ ID NO: 1538 - DNA, 657 bp, Artificial Sequence; identical to SEQ ID NO: 1490
  Synthetic: LC Ab102

SEQ ID NO: 1539 - DNA, 657 bp, Artificial Sequence; identical to SEQ ID NO: 1452
  Synthetic: LC Ab103

SEQ ID NO: 1540 - DNA, 657 bp, Artificial Sequence; identical to SEQ ID NO: 1523
  Synthetic: LC Ab104

SEQ ID NO: 1541 - DNA, 657 bp, Artificial Sequence; identical to SEQ ID NO: 1526
  Synthetic: LC Ab105

SEQ ID NO: 1542 - DNA, 657 bp, Artificial Sequence; identical to SEQ ID NO: 1527
  Synthetic: LC Ab106

SEQ ID NO: 1543 - DNA, 657 bp, Artificial Sequence; identical to SEQ ID NO: 1536
  Synthetic: LC Ab 107

SEQ ID NO: 1544 - protein, 8 aa, Artificial Sequence
  Synthetic: VHCDR1 (IMGT) Ab1
GFTFSSYA

SEQ ID NO: 1545 - protein, 8 aa, Artificial Sequence
  Synthetic: VHCDR2 (IMGT) Ab1
ISYDGSNK

SEQ ID NO: 1546 - protein, 17 aa, Artificial Sequence
  Synthetic: VHCDR3 (IMGT) Ab1
VRGAGRGYTYGPDGFDI

SEQ ID NO: 1547 - protein, 11 aa, Artificial Sequence
  Synthetic: VLCDR1 (IMGT) Ab1
QSLVYTDGITY

SEQ ID NO: 1548 - protein, 3 aa, Artificial Sequence
  Synthetic: VLCDR2 (IMGT) Ab1
EIS

SEQ ID NO: 1549 - protein, 9 aa, Artificial Sequence
  Synthetic: VLCDR3 (IMGT) Ab1
MQATQFPWT

SEQ ID NO: 1550 - protein, 8 aa, Artificial Sequence
  Synthetic: VHCDR1 (IMGT) Ab2
GFTFSSYA

SEQ ID NO: 1551 - protein, 8 aa, Artificial Sequence
  Synthetic: VHCDR2 (IMGT) Ab2
ISYDGSNK

SEQ ID NO: 1552 - protein, 17 aa, Artificial Sequence
  Synthetic: VHCDR3 (IMGT) Ab2
VRGAGRGYTYGPDGFDI

SEQ ID NO: 1553 - protein, 6 aa, Artificial Sequence
  Synthetic: VLCDR1 (IMGT) Ab2
QSITNY

SEQ ID NO: 1554 - protein, 3 aa, Artificial Sequence
  Synthetic: VLCDR2 (IMGT) Ab2
AAS

SEQ ID NO: 1555 - protein, 9 aa, Artificial Sequence
  Synthetic: VLCDR3 (IMGT) Ab2
QQSYTTPFT

SEQ ID NO: 1556 - protein, 8 aa, Artificial Sequence
  Synthetic: VHCDR1 (IMGT) Ab3
GFTFSQYS

SEQ ID NO: 1557 - protein, 8 aa, Artificial Sequence
  Synthetic: VHCDR2 (IMGT) Ab3
ISFDGADK

SEQ ID NO: 1558 - protein, 17 aa, Artificial Sequence
  Synthetic: VHCDR3 (IMGT) Ab3
VRGAGRGYTYGPDGFDI

SEQ ID NO: 1559 - protein, 6 aa, Artificial Sequence
  Synthetic: VLCDR1 (IMGT) Ab3
QTISRY

SEQ ID NO: 1560 - protein, 3 aa, Artificial Sequence
  Synthetic: VLCDR2 (IMGT) Ab3
TAT

SEQ ID NO: 1561 - protein, 9 aa, Artificial Sequence
  Synthetic: VLCDR3 (IMGT) Ab3
QQTYSAPLT

SEQ ID NO: 1562 - protein, 8 aa, Artificial Sequence
  Synthetic: VHCDR1 (IMGT) Ab4
GFTFSSYA

SEQ ID NO: 1563 - protein, 8 aa, Artificial Sequence
  Synthetic: VHCDR2 (IMGT) Ab4
ISYDGSNK

SEQ ID NO: 1564 - protein, 17 aa, Artificial Sequence
  Synthetic: VHCDR3 (IMGT) Ab4
VRGAGRGYTYGPDGFDI

SEQ ID NO: 1565 - protein, 11 aa, Artificial Sequence
  Synthetic: VLCDR1 (IMGT) Ab4
QSLIFGDGKTY

SEQ ID NO: 1566 - protein, 3 aa, Artificial Sequence
  Synthetic: VLCDR2 (IMGT) Ab4
QVS

SEQ ID NO: 1567 - protein, 9 aa, Artificial Sequence
  Synthetic: VLCDR3 (IMGT) Ab4
MQAKQFPWT

SEQ ID NO: 1568 - protein, 8 aa, Artificial Sequence
  Synthetic: VHCDR1 (IMGT) Ab5
GFTFGHYA

SEQ ID NO: 1569 - protein, 8 aa, Artificial Sequence
  Synthetic: VHCDR2 (IMGT) Ab5
ISYDGSNK

SEQ ID NO: 1570 - protein, 17 aa, Artificial Sequence
  Synthetic: VHCDR3 (IMGT) Ab5
VRGAGRGYTYGPDGFDI

SEQ ID NO: 1571 - protein, 11 aa, Artificial Sequence
  Synthetic: VLCDR1 (IMGT) Ab5
QSLLYSDGKTY

SEQ ID NO: 1572 - protein, 3 aa, Artificial Sequence
  Synthetic: VLCDR2 (IMGT) Ab5
EVS

SEQ ID NO: 1573 - protein, 9 aa, Artificial Sequence
  Synthetic: VLCDR3 (IMGT) Ab5
MQATRFPWT

SEQ ID NO: 1574 - protein, 8 aa, Artificial Sequence
  Synthetic: VHCDR1 (IMGT) Ab6
GFTFSSYA

SEQ ID NO: 1575 - protein, 8 aa, Artificial Sequence
  Synthetic: VHCDR2 (IMGT) Ab6
ISYDGSNK

SEQ ID NO: 1576 - protein, 17 aa, Artificial Sequence
  Synthetic: VHCDR3 (IMGT) Ab6
VRGAGRGYTYGPDGFDI

SEQ ID NO: 1577 - protein, 11 aa, Artificial Sequence
  Synthetic: VLCDR1 (IMGT) Ab6
QSLVYTDGITY

SEQ ID NO: 1578 - protein, 3 aa, Artificial Sequence
  Synthetic: VLCDR2 (IMGT) Ab6
EIS

SEQ ID NO: 1579 - protein, 9 aa, Artificial Sequence
  Synthetic: VLCDR3 (IMGT) Ab6
MQATQFPWT

SEQ ID NO: 1580 - protein, 8 aa, Artificial Sequence
  Synthetic: VHCDR1 (IMGT) Ab7
GFTFSGYA

SEQ ID NO: 1581 - protein, 8 aa, Artificial Sequence
  Synthetic: VHCDR2 (IMGT) Ab7
ISYDGSNK

SEQ ID NO: 1582 - protein, 17 aa, Artificial Sequence
  Synthetic: VHCDR3 (IMGT) Ab7
VRGAGRGYTYGPDGFDI

SEQ ID NO: 1583 - protein, 11 aa, Artificial Sequence
  Synthetic: VLCDR1 (IMGT) Ab7
ESLVYRDGNTY

SEQ ID NO: 1584 - protein, 3 aa, Artificial Sequence
  Synthetic: VLCDR2 (IMGT) Ab7
KVS

SEQ ID NO: 1585 - protein, 9 aa, Artificial Sequence
  Synthetic: VLCDR3 (IMGT) Ab7
MQATQFPWT

SEQ ID NO: 1586 - protein, 8 aa, Artificial Sequence
  Synthetic: VHCDR1 (IMGT) Ab8
GFTFSSYA

SEQ ID NO: 1587 - protein, 8 aa, Artificial Sequence
  Synthetic: VHCDR2 (IMGT) Ab8
ISYDGSNK

SEQ ID NO: 1588 - protein, 17 aa, Artificial Sequence
  Synthetic: VHCDR3 (IMGT) Ab8
VRGAGRGYTYGPDGFDI

SEQ ID NO: 1589 - protein, 11 aa, Artificial Sequence
  Synthetic: VLCDR1 (IMGT) Ab8
QSLVYSDGNTY

SEQ ID NO: 1590 - protein, 3 aa, Artificial Sequence
  Synthetic: VLCDR2 (IMGT) Ab8
KVS

SEQ ID NO: 1591 - protein, 9 aa, Artificial Sequence
  Synthetic: VLCDR3 (IMGT) Ab8
MQATRFPWT

SEQ ID NO: 1592 - protein, 8 aa, Artificial Sequence
  Synthetic: VHCDR1 (IMGT) Ab9
GFSFTTHA

SEQ ID NO: 1593 - protein, 8 aa, Artificial Sequence
  Synthetic: VHCDR2 (IMGT) Ab9
ISYDGSEK

SEQ ID NO: 1594 - protein, 17 aa, Artificial Sequence
  Synthetic: VHCDR3 (IMGT) Ab9
VRGAGRGYTYGPDGFDI

SEQ ID NO: 1595 - protein, 11 aa, Artificial Sequence
  Synthetic: VLCDR1 (IMGT) Ab9
QSLLHSDGKTY

SEQ ID NO: 1596 - protein, 3 aa, Artificial Sequence
  Synthetic: VLCDR2 (IMGT) Ab9
EVS

SEQ ID NO: 1597 - protein, 9 aa, Artificial Sequence
  Synthetic: VLCDR3 (IMGT) Ab9
MQYINLPLT

SEQ ID NO: 1598 - protein, 8 aa, Artificial Sequence
  Synthetic: VHCDR1 (IMGT) Ab10
GFTFGHYA

SEQ ID NO: 1599 - protein, 8 aa, Artificial Sequence
  Synthetic: VHCDR2 (IMGT) Ab10
ISYDGSNK

SEQ ID NO: 1600 - protein, 17 aa, Artificial Sequence
  Synthetic: VHCDR3 (IMGT) Ab10
VRGAGRGYTYGPDGFDI

SEQ ID NO: 1601 - protein, 11 aa, Artificial Sequence
  Synthetic: VLCDR1 (IMGT) Ab10
QSLVYSDGNTY

SEQ ID NO: 1602 - protein, 3 aa, Artificial Sequence
  Synthetic: VLCDR2 (IMGT) Ab10
KVS

SEQ ID NO: 1603 - skipped

SEQ ID NO: 1604 - protein, 8 aa, Artificial Sequence
  Synthetic: VHCDR1 (IMGT) Ab11
GFTFSSYA

SEQ ID NO: 1605 - protein, 8 aa, Artificial Sequence
  Synthetic: VHCDR2 (IMGT) Ab11
ISYDGSNK

SEQ ID NO: 1606 - protein, 17 aa, Artificial Sequence
  Synthetic: VHCDR3 (IMGT) Ab11
VRGAGRGYTYGPDGFDI

SEQ ID NO: 1607 - protein, 11 aa, Artificial Sequence
  Synthetic: VLCDR1 (IMGT) Ab11
QSLVYTDGITY

SEQ ID NO: 1608 - protein, 3 aa, Artificial Sequence
  Synthetic: VLCDR2 (IMGT) Ab11
EIS

SEQ ID NO: 1609 - protein, 9 aa, Artificial Sequence
  Synthetic: VLCDR3 (IMGT) Ab11
MQATQFPWT

SEQ ID NO: 1610 - protein, 8 aa, Artificial Sequence
  Synthetic: VHCDR1 (IMGT) Ab12
GYRFTSHD

SEQ ID NO: 1611 - protein, 8 aa, Artificial Sequence
  Synthetic: VHCDR2 (IMGT) Ab12
INPNNDIT

SEQ ID NO: 1612 - protein, 16 aa, Artificial Sequence
  Synthetic: VHCDR3 (IMGT) Ab12
ARGAGMLFHAVGQFDS

SEQ ID NO: 1613 - protein, 6 aa, Artificial Sequence
  Synthetic: VLCDR1 (IMGT) Ab12
QDIRKN

SEQ ID NO: 1614 - protein, 3 aa, Artificial Sequence
  Synthetic: VLCDR2 (IMGT) Ab12
DAS

SEQ ID NO: 1615 - protein, 9 aa, Artificial Sequence
  Synthetic: VLCDR3 (IMGT) Ab12
LQYGDLPLT

SEQ ID NO: 1616 - protein, 8 aa, Artificial Sequence
  Synthetic: VHCDR1 (IMGT) Ab13
GYRFTSHD

SEQ ID NO: 1617 - protein, 8 aa, Artificial Sequence
  Synthetic: VHCDR2 (IMGT) Ab13
INPNNDIT

SEQ ID NO: 1618 - protein, 16 aa, Artificial Sequence
  Synthetic: VHCDR3 (IMGT) Ab13
ARGAGMLFHAVGQFDS

SEQ ID NO: 1619 - protein, 6 aa, Artificial Sequence
  Synthetic: VLCDR1 (IMGT) Ab13
QSIGRF

SEQ ID NO: 1620 - protein, 3 aa, Artificial Sequence
  Synthetic: VLCDR2 (IMGT) Ab13
TAS

SEQ ID NO: 1621 - protein, 8 aa, Artificial Sequence
  Synthetic: VLCDR3 (IMGT) Ab13
QQFKNYPT

SEQ ID NO: 1622 - protein, 8 aa, Artificial Sequence
  Synthetic: VHCDR1 (IMGT) Ab14
GFTVSSNY

SEQ ID NO: 1623 - protein, 7 aa, Artificial Sequence
  Synthetic: VHCDR2 (IMGT) Ab14
IFSDGTT

SEQ ID NO: 1624 - protein, 11 aa, Artificial Sequence
  Synthetic: VHCDR3 (IMGT) Ab14
VAGPANGAYDI

SEQ ID NO: 1625 - protein, 6 aa, Artificial Sequence
  Synthetic: VLCDR1 (IMGT) Ab14
QSISNW

SEQ ID NO: 1626 - protein, 3 aa, Artificial Sequence
  Synthetic: VLCDR2 (IMGT) Ab14
RAS

SEQ ID NO: 1627 - protein, 9 aa, Artificial Sequence
  Synthetic: VLCDR3 (IMGT) Ab14
QQYNVYSGT

SEQ ID NO: 1628 - protein, 8 aa, Artificial Sequence
  Synthetic: VHCDR1 (IMGT) Ab15
GFTFSSYA

SEQ ID NO: 1629 - protein, 8 aa, Artificial Sequence
  Synthetic: VHCDR2 (IMGT) Ab15
ISYDGSNK

SEQ ID NO: 1630 - protein, 17 aa, Artificial Sequence
  Synthetic: VHCDR3 (IMGT) Ab15
VRGAGRGYTYGPDGFDI

SEQ ID NO: 1631 - protein, 11 aa, Artificial Sequence
  Synthetic: VLCDR1 (IMGT) Ab15
RSLLHSDGKTY

SEQ ID NO: 1632 - protein, 3 aa, Artificial Sequence
  Synthetic: VLCDR2 (IMGT) Ab15
ELS

SEQ ID NO: 1633 - protein, 9 aa, Artificial Sequence
  Synthetic: VLCDR3 (IMGT) Ab15
MQYIEAPLT

SEQ ID NO: 1634 - protein, 8 aa, Artificial Sequence
  Synthetic: VHCDR1 (IMGT) Ab16
GFTFSSYA

SEQ ID NO: 1635 - protein, 8 aa, Artificial Sequence
  Synthetic: VHCDR2 (IMGT) Ab16
ISYDGSNK

SEQ ID NO: 1636 - protein, 17 aa, Artificial Sequence
  Synthetic: VHCDR3 (IMGT) Ab16
VRGAGRGYTRGPDGFDI

SEQ ID NO: 1637 - protein, 11 aa, Artificial Sequence
  Synthetic: VLCDR1 (IMGT) Ab16
RSLLHSDGKTY

SEQ ID NO: 1638 - protein, 3 aa, Artificial Sequence
  Synthetic: VLCDR2 (IMGT) Ab16
ELS

SEQ ID NO: 1639 - protein, 9 aa, Artificial Sequence
  Synthetic: VLCDR3 (IMGT) Ab16
MQYIEAPLT

SEQ ID NO: 1640 - protein, 8 aa, Artificial Sequence
  Synthetic: VHCDR1 (IMGT) Ab17
GFTFSSYA

SEQ ID NO: 1641 - protein, 8 aa, Artificial Sequence
  Synthetic: VHCDR2 (IMGT) Ab17
ISYDGSNK

SEQ ID NO: 1642 - protein, 17 aa, Artificial Sequence
  Synthetic: VHCDR3 (IMGT) Ab17
VRGAGRGYTNGPDGFDI

SEQ ID NO: 1643 - protein, 11 aa, Artificial Sequence
  Synthetic: VLCDR1 (IMGT) Ab17
RSLLHSDGKTY

SEQ ID NO: 1644 - protein, 3 aa, Artificial Sequence
  Synthetic: VLCDR2 (IMGT) Ab17
ELS

SEQ ID NO: 1645 - protein, 9 aa, Artificial Sequence
  Synthetic: VLCDR3 (IMGT) Ab17
MQYIEAPLT

SEQ ID NO: 1646 - protein, 8 aa, Artificial Sequence
  Synthetic: VHCDR1 (IMGT) Ab18
GFTFSSYA

SEQ ID NO: 1647 - protein, 8 aa, Artificial Sequence
  Synthetic: VHCDR2 (IMGT) Ab18
ISYDGSNK

SEQ ID NO: 1648 - protein, 17 aa, Artificial Sequence
  Synthetic: VHCDR3 (IMGT) Ab18
VRGAGRGFTWGPDGFDI

SEQ ID NO: 1649 - protein, 11 aa, Artificial Sequence
  Synthetic: VLCDR1 (IMGT) Ab18
RSLLHSDGKTY

SEQ ID NO: 1650 - protein, 3 aa, Artificial Sequence
  Synthetic: VLCDR2 (IMGT) Ab18
ELS

SEQ ID NO: 1651 - protein, 9 aa, Artificial Sequence
  Synthetic: VLCDR3 (IMGT) Ab18
MQYIEAPLT

SEQ ID NO: 1652 - protein, 8 aa, Artificial Sequence
  Synthetic: VHCDR1 (IMGT) Ab19
GFTFSSYA

SEQ ID NO: 1653 - protein, 8 aa, Artificial Sequence
  Synthetic: VHCDR2 (IMGT) Ab19
ISYDGSNK

SEQ ID NO: 1654 - protein, 17 aa, Artificial Sequence
  Synthetic: VHCDR3 (IMGT) Ab19
VRGAGRGFTLGPDGFDI

SEQ ID NO: 1655 - protein, 11 aa, Artificial Sequence
  Synthetic: VLCDR1 (IMGT) Ab19
RSLLHSDGKTY

SEQ ID NO: 1656 - protein, 3 aa, Artificial Sequence
  Synthetic: VLCDR2 (IMGT) Ab19
ELS

SEQ ID NO: 1657 - protein, 9 aa, Artificial Sequence
  Synthetic: VLCDR3 (IMGT) Ab19
MQYIEAPLT

SEQ ID NO: 1658 - protein, 8 aa, Artificial Sequence
  Synthetic: VHCDR1 (IMGT) Ab20
GFTFSSYA

SEQ ID NO: 1659 - protein, 8 aa, Artificial Sequence
  Synthetic: VHCDR2 (IMGT) Ab20
ISYDGSNK

SEQ ID NO: 1660 - protein, 17 aa, Artificial Sequence
  Synthetic: VHCDR3 (IMGT) Ab20
VRGAGRGLTFGPDGFDI

SEQ ID NO: 1661 - protein, 11 aa, Artificial Sequence
  Synthetic: VLCDR1 (IMGT) Ab20
RSLLHSDGKTY

SEQ ID NO: 1662 - protein, 3 aa, Artificial Sequence
  Synthetic: VLCDR2 (IMGT) Ab20
ELS

SEQ ID NO: 1663 - protein, 9 aa, Artificial Sequence
  Synthetic: VLCDR3 (IMGT) Ab20
MQYIEAPLT

SEQ ID NO: 1664 - protein, 8 aa, Artificial Sequence
  Synthetic: VHCDR1 (IMGT) Ab21
GFTFSSYA

SEQ ID NO: 1665 - protein, 8 aa, Artificial Sequence
  Synthetic: VHCDR2 (IMGT) Ab21
ISYDGSNK

SEQ ID NO: 1666 - protein, 17 aa, Artificial Sequence
  Synthetic: VHCDR3 (IMGT) Ab21
VRGAGLGWPYGPDGFDI

SEQ ID NO: 1667 - protein, 11 aa, Artificial Sequence
  Synthetic: VLCDR1 (IMGT) Ab21
RSLLHSDGKTY

SEQ ID NO: 1668 - protein, 3 aa, Artificial Sequence
  Synthetic: VLCDR2 (IMGT) Ab21
ELS

SEQ ID NO: 1669 - protein, 9 aa, Artificial Sequence
  Synthetic: VLCDR3 (IMGT) Ab21
MQYIEAPLT

SEQ ID NO: 1670 - protein, 8 aa, Artificial Sequence
  Synthetic: VHCDR1 (IMGT) Ab22
GFTFSSYA

SEQ ID NO: 1671 - protein, 8 aa, Artificial Sequence
  Synthetic: VHCDR2 (IMGT) Ab22
ISYDGSNK

SEQ ID NO: 1672 - protein, 17 aa, Artificial Sequence
  Synthetic: VHCDR3 (IMGT) Ab22
VRGAGRGFTKGPDGFDI

SEQ ID NO: 1673 - protein, 11 aa, Artificial Sequence
  Synthetic: VLCDR1 (IMGT) Ab22
RSLLHSDGKTY

SEQ ID NO: 1674 - protein, 3 aa, Artificial Sequence
  Synthetic: VLCDR2 (IMGT) Ab22
ELS

SEQ ID NO: 1675 - protein, 9 aa, Artificial Sequence
  Synthetic: VLCDR3 (IMGT) Ab22
MQYIEAPLT

SEQ ID NO: 1676 - protein, 8 aa, Artificial Sequence
  Synthetic: VHCDR1 (IMGT) Ab23
GFTFSSYA

SEQ ID NO: 1677 - protein, 8 aa, Artificial Sequence
  Synthetic: VHCDR2 (IMGT) Ab23
ISYDGSNK

SEQ ID NO: 1678 - protein, 17 aa, Artificial Sequence
  Synthetic: VHCDR3 (IMGT) Ab23
VRGAGRGLTYGPDGFDI

SEQ ID NO: 1679 - protein, 11 aa, Artificial Sequence
  Synthetic: VLCDR1 (IMGT) Ab23
RSLLHSDGKTY

SEQ ID NO: 1680 - protein, 3 aa, Artificial Sequence
  Synthetic: VLCDR2 (IMGT) Ab23
ELS

SEQ ID NO: 1681 - protein, 9 aa, Artificial Sequence
  Synthetic: VLCDR3 (IMGT) Ab23
MQYIEAPLT

SEQ ID NO: 1682 - protein, 8 aa, Artificial Sequence
  Synthetic: VHCDR1 (IMGT) Ab24
GFTFSSYA

SEQ ID NO: 1683 - protein, 8 aa, Artificial Sequence
  Synthetic: VHCDR2 (IMGT) Ab24
ISYDGSNK

SEQ ID NO: 1684 - protein, 17 aa, Artificial Sequence
  Synthetic: VHCDR3 (IMGT) Ab24
VRGAGRGLIYGPDGFDI

SEQ ID NO: 1685 - protein, 11 aa, Artificial Sequence
  Synthetic: VLCDR1 (IMGT) Ab24
RSLLHSDGKTY

SEQ ID NO: 1686 - protein, 3 aa, Artificial Sequence
  Synthetic: VLCDR2 (IMGT) Ab24
ELS

SEQ ID NO: 1687 - protein, 9 aa, Artificial Sequence
  Synthetic: VLCDR3 (IMGT) Ab24
MQYIEAPLT

SEQ ID NO: 1688 - protein, 8 aa, Artificial Sequence
  Synthetic: VHCDR1 (IMGT) Ab25
GFTFSSYA

SEQ ID NO: 1689 - protein, 8 aa, Artificial Sequence
  Synthetic: VHCDR2 (IMGT) Ab25
ISYDGSNK

SEQ ID NO: 1690 - protein, 17 aa, Artificial Sequence
  Synthetic: VHCDR3 (IMGT) Ab25
VRGAGLGFTYGPDGFDI

SEQ ID NO: 1691 - protein, 11 aa, Artificial Sequence
  Synthetic: VLCDR1 (IMGT) Ab25
RSLLHSDGKTY

SEQ ID NO: 1692 - protein, 3 aa, Artificial Sequence
  Synthetic: VLCDR2 (IMGT) Ab25
ELS

SEQ ID NO: 1693 - protein, 9 aa, Artificial Sequence
  Synthetic: VLCDR3 (IMGT) Ab25
MQYIEAPLT

SEQ ID NO: 1694 - protein, 8 aa, Artificial Sequence
  Synthetic: VHCDR1 (IMGT) Ab26
GFTFSSYA

SEQ ID NO: 1695 - protein, 8 aa, Artificial Sequence
  Synthetic: VHCDR2 (IMGT) Ab26
ISYDGSNK

SEQ ID NO: 1696 - protein, 17 aa, Artificial Sequence
  Synthetic: VHCDR3 (IMGT) Ab26
VRGAGQGLSYGPDGFDI

SEQ ID NO: 1697 - protein, 11 aa, Artificial Sequence
  Synthetic: VLCDR1 (IMGT) Ab26
RSLLHSDGKTY

SEQ ID NO: 1698 - protein, 3 aa, Artificial Sequence
  Synthetic: VLCDR2 (IMGT) Ab26
ELS

SEQ ID NO: 1699 - protein, 9 aa, Artificial Sequence
  Synthetic: VLCDR3 (IMGT) Ab26
MQYIEAPLT

SEQ ID NO: 1700 - protein, 8 aa, Artificial Sequence
  Synthetic: VHCDR1 (IMGT) Ab27
GFTFSSYA

SEQ ID NO: 1701 - protein, 8 aa, Artificial Sequence
  Synthetic: VHCDR2 (IMGT) Ab27
ISYDGSNK

SEQ ID NO: 1702 - protein, 17 aa, Artificial Sequence
  Synthetic: VHCDR3 (IMGT) Ab27
VRGAGRGYTLGPDGFDI

SEQ ID NO: 1703 - protein, 11 aa, Artificial Sequence
  Synthetic: VLCDR1 (IMGT) Ab27
RSLLHSDGKTY

SEQ ID NO: 1704 - protein, 3 aa, Artificial Sequence
  Synthetic: VLCDR2 (IMGT) Ab27
ELS

SEQ ID NO: 1705 - protein, 9 aa, Artificial Sequence
  Synthetic: VLCDR3 (IMGT) Ab27
MQYIEAPLT

SEQ ID NO: 1706 - protein, 8 aa, Artificial Sequence
  Synthetic: VHCDR1 (IMGT) Ab28
GFTFSSYA

SEQ ID NO: 1707 - protein, 8 aa, Artificial Sequence
  Synthetic: VHCDR2 (IMGT) Ab28
ISYDGSNK

SEQ ID NO: 1708 - protein, 17 aa, Artificial Sequence
  Synthetic: VHCDR3 (IMGT) Ab28
VRGAGRGFTYGPDGFDI

SEQ ID NO: 1709 - protein, 11 aa, Artificial Sequence
  Synthetic: VLCDR1 (IMGT) Ab28
RSLLHSDGKTY

SEQ ID NO: 1710 - protein, 3 aa, Artificial Sequence
  Synthetic: VLCDR2 (IMGT) Ab28
ELS

SEQ ID NO: 1711 - protein, 9 aa, Artificial Sequence
  Synthetic: VLCDR3 (IMGT) Ab28
MQYIEAPLT

SEQ ID NO: 1712 - protein, 8 aa, Artificial Sequence
  Synthetic: VHCDR1 (IMGT) Ab29
GFTFSSYA

SEQ ID NO: 1713 - protein, 8 aa, Artificial Sequence
  Synthetic: VHCDR2 (IMGT) Ab29
ISYDGSNK

SEQ ID NO: 1714 - protein, 17 aa, Artificial Sequence
  Synthetic: VHCDR3 (IMGT) Ab29
VRGAGLGWPYGPDGFDI

SEQ ID NO: 1715 - protein, 11 aa, Artificial Sequence
  Synthetic: VLCDR1 (IMGT) Ab29
RSLLHSDGKTY

SEQ ID NO: 1716 - protein, 3 aa, Artificial Sequence
  Synthetic: VLCDR2 (IMGT) Ab29
ELS

SEQ ID NO: 1717 - protein, 9 aa, Artificial Sequence
  Synthetic: VLCDR3 (IMGT) Ab29
MQYVEAPLT

SEQ ID NO: 1718 - protein, 8 aa, Artificial Sequence
  Synthetic: VHCDR1 (IMGT) Ab30
GFTFSSYA

SEQ ID NO: 1719 - protein, 8 aa, Artificial Sequence
  Synthetic: VHCDR2 (IMGT) Ab30
ISYDGSNK

SEQ ID NO: 1720 - protein, 17 aa, Artificial Sequence
  Synthetic: VHCDR3 (IMGT) Ab30
VRGAGRGFTWGPDGFDI

SEQ ID NO: 1721 - protein, 11 aa, Artificial Sequence
  Synthetic: VLCDR1 (IMGT) Ab30
RSLLHSDGKTY

SEQ ID NO: 1722 - protein, 3 aa, Artificial Sequence
  Synthetic: VLCDR2 (IMGT) Ab30
ELS

SEQ ID NO: 1723 - protein, 9 aa, Artificial Sequence
  Synthetic: VLCDR3 (IMGT) Ab30
MQYVEAPLT

SEQ ID NO: 1724 - protein, 8 aa, Artificial Sequence
  Synthetic: VHCDR1 (IMGT) Ab31
GFTFSSYA

SEQ ID NO: 1725 - protein, 8 aa, Artificial Sequence
  Synthetic: VHCDR2 (IMGT) Ab31
ISYDGSNK

SEQ ID NO: 1726 - protein, 17 aa, Artificial Sequence
  Synthetic: VHCDR3 (IMGT) Ab31
VRGAGRGLTYGPDGFDI

SEQ ID NO: 1727 - protein, 11 aa, Artificial Sequence
  Synthetic: VLCDR1 (IMGT) Ab31
RSLLHSDGKTY

SEQ ID NO: 1728 - protein, 3 aa, Artificial Sequence
  Synthetic: VLCDR2 (IMGT) Ab31
ELS

SEQ ID NO: 1729 - protein, 9 aa, Artificial Sequence
  Synthetic: VLCDR3 (IMGT) Ab31
MQYVEAPLT

SEQ ID NO: 1730 - protein, 8 aa, Artificial Sequence
  Synthetic: VHCDR1 (IMGT) Ab32
GFTFSSYA

SEQ ID NO: 1731 - protein, 8 aa, Artificial Sequence
  Synthetic: VHCDR2 (IMGT) Ab32
ISYDGSNK

SEQ ID NO: 1732 - protein, 17 aa, Artificial Sequence
  Synthetic: VHCDR3 (IMGT) Ab32
VRGAGLGFTYGPDGFDI

SEQ ID NO: 1733 - protein, 11 aa, Artificial Sequence
  Synthetic: VLCDR1 (IMGT) Ab32
RSLLHSDGKTY

SEQ ID NO: 1734 - protein, 3 aa, Artificial Sequence
  Synthetic: VLCDR2 (IMGT) Ab32
ELS

SEQ ID NO: 1735 - protein, 9 aa, Artificial Sequence
  Synthetic: VLCDR3 (IMGT) Ab32
MQYVEAPLT

SEQ ID NO: 1736 - protein, 8 aa, Artificial Sequence
  Synthetic: VHCDR1 (IMGT) Ab33
GFTFSSYA

SEQ ID NO: 1737 - protein, 8 aa, Artificial Sequence
  Synthetic: VHCDR2 (IMGT) Ab33
ISYDGSNK

SEQ ID NO: 1738 - protein, 17 aa, Artificial Sequence
  Synthetic: VHCDR3 (IMGT) Ab33
VRGAGQGLSYGPDGFDI

SEQ ID NO: 1739 - protein, 11 aa, Artificial Sequence
  Synthetic: VLCDR1 (IMGT) Ab33
RSLLHSDGKTY

SEQ ID NO: 1740 - protein, 3 aa, Artificial Sequence
  Synthetic: VLCDR2 (IMGT) Ab33
ELS

SEQ ID NO: 1741 - protein, 9 aa, Artificial Sequence
  Synthetic: VLCDR3 (IMGT) Ab33
MQYVEAPLT

SEQ ID NO: 1742 - protein, 8 aa, Artificial Sequence
  Synthetic: VHCDR1 (IMGT) Ab34
GFTFSSYA

SEQ ID NO: 1743 - protein, 8 aa, Artificial Sequence
  Synthetic: VHCDR2 (IMGT) Ab34
ISYDGSNK

SEQ ID NO: 1744 - protein, 17 aa, Artificial Sequence
  Synthetic: VHCDR3 (IMGT) Ab34
VRGAGRGYTRGPDGFDI

SEQ ID NO: 1745 - protein, 11 aa, Artificial Sequence
  Synthetic: VLCDR1 (IMGT) Ab34
RSLLHSDGKTY

SEQ ID NO: 1746 - protein, 3 aa, Artificial Sequence
  Synthetic: VLCDR2 (IMGT) Ab34
ELS

SEQ ID NO: 1747 - protein, 9 aa, Artificial Sequence
  Synthetic: VLCDR3 (IMGT) Ab34
MQYVEAPLT

SEQ ID NO: 1748 - protein, 8 aa, Artificial Sequence
  Synthetic: VHCDR1 (IMGT) Ab35
GFTFSSYA

SEQ ID NO: 1749 - protein, 8 aa, Artificial Sequence
  Synthetic: VHCDR2 (IMGT) Ab35
ISYDGSNK

SEQ ID NO: 1750 - protein, 17 aa, Artificial Sequence
  Synthetic: VHCDR3 (IMGT) Ab35
VRGAGRGYTNGPDGFDI

SEQ ID NO: 1751 - protein, 11 aa, Artificial Sequence
  Synthetic: VLCDR1 (IMGT) Ab35
RSLLHSDGKTY

SEQ ID NO: 1752 - protein, 3 aa, Artificial Sequence
  Synthetic: VLCDR2 (IMGT) Ab35
ELS

SEQ ID NO: 1753 - protein, 9 aa, Artificial Sequence
  Synthetic: VLCDR3 (IMGT) Ab35
MQYVEAPLT

SEQ ID NO: 1754 - protein, 8 aa, Artificial Sequence
  Synthetic: VHCDR1 (IMGT) Ab36
GFTFSSYA

SEQ ID NO: 1755 - protein, 8 aa, Artificial Sequence
  Synthetic: VHCDR2 (IMGT) Ab36
ISYDGSNK

SEQ ID NO: 1756 - protein, 17 aa, Artificial Sequence
  Synthetic: VHCDR3 (IMGT) Ab36
VRGAGRGFTYGPDGFDI

SEQ ID NO: 1757 - protein, 11 aa, Artificial Sequence
  Synthetic: VLCDR1 (IMGT) Ab36
RSLLHSDGKTY

SEQ ID NO: 1758 - protein, 3 aa, Artificial Sequence
  Synthetic: VLCDR2 (IMGT) Ab36
ELS

SEQ ID NO: 1759 - protein, 9 aa, Artificial Sequence
  Synthetic: VLCDR3 (IMGT) Ab36
MQYIEAPLT

SEQ ID NO: 1760 - protein, 8 aa, Artificial Sequence
  Synthetic: VHCDR1 (IMGT) Ab37
GFTFSSYA

SEQ ID NO: 1761 - protein, 8 aa, Artificial Sequence
  Synthetic: VHCDR2 (IMGT) Ab37
ISYDGSNK

SEQ ID NO: 1762 - protein, 17 aa, Artificial Sequence
  Synthetic: VHCDR3 (IMGT) Ab37
VRGAGRGLTYGPDGFDI

SEQ ID NO: 1763 - protein, 11 aa, Artificial Sequence
  Synthetic: VLCDR1 (IMGT) Ab37
RSLLHSDGKTY

SEQ ID NO: 1764 - protein, 3 aa, Artificial Sequence
  Synthetic: VLCDR2 (IMGT) Ab37
ELS

SEQ ID NO: 1765 - protein, 9 aa, Artificial Sequence
  Synthetic: VLCDR3 (IMGT) Ab37
MQYIEAPLT

SEQ ID NO: 1766 - protein, 8 aa, Artificial Sequence
  Synthetic: VHCDR1 (IMGT) Ab38
GFTFSSYA

SEQ ID NO: 1767 - protein, 8 aa, Artificial Sequence
  Synthetic: VHCDR2 (IMGT) Ab38
ISYDGSNK

SEQ ID NO: 1768 - protein, 17 aa, Artificial Sequence
  Synthetic: VHCDR3 (IMGT) Ab38
VRGAGQGYPYGPDGFDI

SEQ ID NO: 1769 - protein, 11 aa, Artificial Sequence
  Synthetic: VLCDR1 (IMGT) Ab38
RSLLHSDGKTY

SEQ ID NO: 1770 - protein, 3 aa, Artificial Sequence
  Synthetic: VLCDR2 (IMGT) Ab38
ELS

SEQ ID NO: 1771 - protein, 9 aa, Artificial Sequence
  Synthetic: VLCDR3 (IMGT) Ab38
MQYIEAPLT

SEQ ID NO: 1772 - protein, 8 aa, Artificial Sequence
  Synthetic: VHCDR1 (IMGT) Ab39
GFTFSSYA

SEQ ID NO: 1773 - protein, 8 aa, Artificial Sequence
  Synthetic: VHCDR2 (IMGT) Ab39
ISYDGSNK

SEQ ID NO: 1774 - protein, 17 aa, Artificial Sequence
  Synthetic: VHCDR3 (IMGT) Ab39
VRGAGTGFTYGPDGFDI

SEQ ID NO: 1775 - protein, 11 aa, Artificial Sequence
  Synthetic: VLCDR1 (IMGT) Ab39
RSLLHSDGKTY

SEQ ID NO: 1776 - protein, 3 aa, Artificial Sequence
  Synthetic: VLCDR2 (IMGT) Ab39
ELS

SEQ ID NO: 1777 - protein, 9 aa, Artificial Sequence
  Synthetic: VLCDR3 (IMGT) Ab39
MQYIEAPLT

SEQ ID NO: 1778 - protein, 8 aa, Artificial Sequence
  Synthetic: VHCDR1 (IMGT) Ab40
GFTFSSYA

SEQ ID NO: 1779 - protein, 8 aa, Artificial Sequence
  Synthetic: VHCDR2 (IMGT) Ab40
ISYDGSNK

SEQ ID NO: 1780 - protein, 17 aa, Artificial Sequence
  Synthetic: VHCDR3 (IMGT) Ab40
VRGAGMGLTYGPDGFDI

SEQ ID NO: 1781 - protein, 11 aa, Artificial Sequence
  Synthetic: VLCDR1 (IMGT) Ab40
RSLLHSDGKTY

SEQ ID NO: 1782 - protein, 3 aa, Artificial Sequence
  Synthetic: VLCDR2 (IMGT) Ab40
ELS

SEQ ID NO: 1783 - protein, 9 aa, Artificial Sequence
  Synthetic: VLCDR3 (IMGT) Ab40
MQYIEAPLT

SEQ ID NO: 1784 - protein, 8 aa, Artificial Sequence
  Synthetic: VHCDR1 (IMGT) Ab41
GFTFSSYA

SEQ ID NO: 1785 - protein, 8 aa, Artificial Sequence
  Synthetic: VHCDR2 (IMGT) Ab41
ISYDGSNK

SEQ ID NO: 1786 - protein, 17 aa, Artificial Sequence
  Synthetic: VHCDR3 (IMGT) Ab41
VRGAGLGFPYGPDGFDI

SEQ ID NO: 1787 - protein, 11 aa, Artificial Sequence
  Synthetic: VLCDR1 (IMGT) Ab41
RSLLHSDGKTY

SEQ ID NO: 1788 - protein, 3 aa, Artificial Sequence
  Synthetic: VLCDR2 (IMGT) Ab41
ELS

SEQ ID NO: 1789 - protein, 9 aa, Artificial Sequence
  Synthetic: VLCDR3 (IMGT) Ab41
MQYIEAPLT

SEQ ID NO: 1790 - protein, 8 aa, Artificial Sequence
  Synthetic: VHCDR1 (IMGT) Ab42
GFTFSSYA

SEQ ID NO: 1791 - protein, 8 aa, Artificial Sequence
  Synthetic: VHCDR2 (IMGT) Ab42
ISYDGSNK

SEQ ID NO: 1792 - protein, 17 aa, Artificial Sequence
  Synthetic: VHCDR3 (IMGT) Ab42
VRGAGLGWAYGPDGFDI

SEQ ID NO: 1793 - protein, 11 aa, Artificial Sequence
  Synthetic: VLCDR1 (IMGT) Ab42
RSLLHSDGKTY

SEQ ID NO: 1794 - protein, 3 aa, Artificial Sequence
  Synthetic: VLCDR2 (IMGT) Ab42
ELS

SEQ ID NO: 1795 - protein, 9 aa, Artificial Sequence
  Synthetic: VLCDR3 (IMGT) Ab42
MQYIEAPLT

SEQ ID NO: 1796 - protein, 8 aa, Artificial Sequence
  Synthetic: VHCDR1 (IMGT) Ab43
GFTFSSYA

SEQ ID NO: 1797 - protein, 8 aa, Artificial Sequence
  Synthetic: VHCDR2 (IMGT) Ab43
ISYDGSNK

SEQ ID NO: 1798 - protein, 17 aa, Artificial Sequence
  Synthetic: VHCDR3 (IMGT) Ab43
VRGAGRGYPYGPDGFDI

SEQ ID NO: 1799 - protein, 11 aa, Artificial Sequence
  Synthetic: VLCDR1 (IMGT) Ab43
RSLLHSDGKTY

SEQ ID NO: 1800 - protein, 3 aa, Artificial Sequence
  Synthetic: VLCDR2 (IMGT) Ab43
ELS

SEQ ID NO: 1801 - protein, 9 aa, Artificial Sequence
  Synthetic: VLCDR3 (IMGT) Ab43
MQYIEAPLT

SEQ ID NO: 1802 - protein, 8 aa, Artificial Sequence
  Synthetic: VHCDR1 (IMGT) Ab44
GFDFAGYA

SEQ ID NO: 1803 - protein, 8 aa, Artificial Sequence
  Synthetic: VHCDR2 (IMGT) Ab44
ISYDGSNK

SEQ ID NO: 1804 - protein, 17 aa, Artificial Sequence
  Synthetic: VHCDR3 (IMGT) Ab44
VRGAGRGLTYGPDGFDI

SEQ ID NO: 1805 - protein, 11 aa, Artificial Sequence
  Synthetic: VLCDR1 (IMGT) Ab44
RSLLHSDGKTY

SEQ ID NO: 1806 - protein, 3 aa, Artificial Sequence
  Synthetic: VLCDR2 (IMGT) Ab44
ELS

SEQ ID NO: 1807 - protein, 9 aa, Artificial Sequence
  Synthetic: VLCDR3 (IMGT) Ab44
MQYIEAPLT

SEQ ID NO: 1808 - protein, 8 aa, Artificial Sequence
  Synthetic: VHCDR1 (IMGT) Ab45
GFTFSSYA

SEQ ID NO: 1809 - protein, 8 aa, Artificial Sequence
  Synthetic: VHCDR2 (IMGT) Ab45
ISYDGSNK

SEQ ID NO: 1810 - protein, 17 aa, Artificial Sequence
  Synthetic: VHCDR3 (IMGT) Ab45
VRGAGLGLTYGPDGFDI

SEQ ID NO: 1811 - protein, 11 aa, Artificial Sequence
  Synthetic: VLCDR1 (IMGT) Ab45
RSLLHSDGKTY

SEQ ID NO: 1812 - protein, 3 aa, Artificial Sequence
  Synthetic: VLCDR2 (IMGT) Ab45
ELS

SEQ ID NO: 1813 - protein, 9 aa, Artificial Sequence
  Synthetic: VLCDR3 (IMGT) Ab45
MQYIEAPLT

SEQ ID NO: 1814 - protein, 8 aa, Artificial Sequence
  Synthetic: VHCDR1 (IMGT) Ab46
GFTFSSYA

SEQ ID NO: 1815 - protein, 8 aa, Artificial Sequence
  Synthetic: VHCDR2 (IMGT) Ab46
ISYDGSNK

SEQ ID NO: 1816 - protein, 17 aa, Artificial Sequence
  Synthetic: VHCDR3 (IMGT) Ab46
VRGAGLGYPYGPDGFDI

SEQ ID NO: 1817 - protein, 11 aa, Artificial Sequence
  Synthetic: VLCDR1 (IMGT) Ab46
RSLLHSDGKTY

SEQ ID NO: 1818 - protein, 3 aa, Artificial Sequence
  Synthetic: VLCDR2 (IMGT) Ab46
ELS

SEQ ID NO: 1819 - protein, 9 aa, Artificial Sequence
  Synthetic: VLCDR3 (IMGT) Ab46
MQYIEAPLT

SEQ ID NO: 1820 - protein, 8 aa, Artificial Sequence
  Synthetic: VHCDR1 (IMGT) Ab47
GFTFSSYA

SEQ ID NO: 1821 - protein, 8 aa, Artificial Sequence
  Synthetic: VHCDR2 (IMGT) Ab47
ISYDGSNK

SEQ ID NO: 1822 - protein, 17 aa, Artificial Sequence
  Synthetic: VHCDR3 (IMGT) Ab47
VRGAGRGYPHGPDGFDI

SEQ ID NO: 1823 - protein, 11 aa, Artificial Sequence
  Synthetic: VLCDR1 (IMGT) Ab47
RSLLHSDGKTY

SEQ ID NO: 1824 - protein, 3 aa, Artificial Sequence
  Synthetic: VLCDR2 (IMGT) Ab47
ELS

SEQ ID NO: 1825 - protein, 9 aa, Artificial Sequence
  Synthetic: VLCDR3 (IMGT) Ab47
MQYIEAPLT

SEQ ID NO: 1826 - protein, 8 aa, Artificial Sequence
  Synthetic: VHCDR1 (IMGT) Ab48
GFTFSSYA

SEQ ID NO: 1827 - protein, 8 aa, Artificial Sequence
  Synthetic: VHCDR2 (IMGT) Ab48
ISYDGSNK

SEQ ID NO: 1828 - protein, 17 aa, Artificial Sequence
  Synthetic: VHCDR3 (IMGT) Ab48
VRGAGIGYPHGPDGFDI

SEQ ID NO: 1829 - protein, 11 aa, Artificial Sequence
  Synthetic: VLCDR1 (IMGT) Ab48
RSLLHSDGKTY

SEQ ID NO: 1830 - protein, 3 aa, Artificial Sequence
  Synthetic: VLCDR2 (IMGT) Ab48
ELS

SEQ ID NO: 1831 - protein, 9 aa, Artificial Sequence
  Synthetic: VLCDR3 (IMGT) Ab48
MQYIEAPLT

SEQ ID NO: 1832 - protein, 8 aa, Artificial Sequence
  Synthetic: VHCDR1 (IMGT) Ab49
GFTFSSYA

SEQ ID NO: 1833 - protein, 8 aa, Artificial Sequence
  Synthetic: VHCDR2 (IMGT) Ab49
ISYDGSNK

SEQ ID NO: 1834 - protein, 17 aa, Artificial Sequence
  Synthetic: VHCDR3 (IMGT) Ab49
VRGAGRGYPYGPDGFDI

SEQ ID NO: 1835 - protein, 11 aa, Artificial Sequence
  Synthetic: VLCDR1 (IMGT) Ab49
RSLLHSDGKTY

SEQ ID NO: 1836 - protein, 3 aa, Artificial Sequence
  Synthetic: VLCDR2 (IMGT) Ab49
ELS

SEQ ID NO: 1837 - protein, 9 aa, Artificial Sequence
  Synthetic: VLCDR3 (IMGT) Ab49
MQYIEAPLT

SEQ ID NO: 1838 - protein, 8 aa, Artificial Sequence
  Synthetic: VHCDR1 (IMGT) Ab50
GFTFSSYA

SEQ ID NO: 1839 - protein, 8 aa, Artificial Sequence
  Synthetic: VHCDR2 (IMGT) Ab50
ISYDGSNK

SEQ ID NO: 1840 - protein, 17 aa, Artificial Sequence
  Synthetic: VHCDR3 (IMGT) Ab50
VRGAGLGFPFGPDGFDI

SEQ ID NO: 1841 - protein, 11 aa, Artificial Sequence
  Synthetic: VLCDR1 (IMGT) Ab50
RSLLHSDGKTY

SEQ ID NO: 1842 - protein, 3 aa, Artificial Sequence
  Synthetic: VLCDR2 (IMGT) Ab50
ELS

SEQ ID NO: 1843 - protein, 9 aa, Artificial Sequence
  Synthetic: VLCDR3 (IMGT) Ab50
MQYIEAPLT

SEQ ID NO: 1844 - protein, 8 aa, Artificial Sequence
  Synthetic: VHCDR1 (IMGT) Ab51
GFTFSSYA

SEQ ID NO: 1845 - protein, 8 aa, Artificial Sequence
  Synthetic: VHCDR2 (IMGT) Ab51
ISYDGSNK

SEQ ID NO: 1846 - protein, 17 aa, Artificial Sequence
  Synthetic: VHCDR3 (IMGT) Ab51
VRGAGRGFPYGPDGFDI

SEQ ID NO: 1847 - protein, 11 aa, Artificial Sequence
  Synthetic: VLCDR1 (IMGT) Ab51
RSLLHSDGKTY

SEQ ID NO: 1848 - protein, 3 aa, Artificial Sequence
  Synthetic: VLCDR2 (IMGT) Ab51
ELS

SEQ ID NO: 1849 - protein, 9 aa, Artificial Sequence
  Synthetic: VLCDR3 (IMGT) Ab51
MQYIEAPLT

SEQ ID NO: 1850 - protein, 8 aa, Artificial Sequence
  Synthetic: VHCDR1 (IMGT) Ab52
GFTFSSYA

SEQ ID NO: 1851 - protein, 8 aa, Artificial Sequence
  Synthetic: VHCDR2 (IMGT) Ab52
ISYDGSNK

SEQ ID NO: 1852 - protein, 17 aa, Artificial Sequence
  Synthetic: VHCDR3 (IMGT) Ab52
VRGAGLGYPNGPDGFDI

SEQ ID NO: 1853 - protein, 11 aa, Artificial Sequence
  Synthetic: VLCDR1 (IMGT) Ab52
RSLLHSDGKTY

SEQ ID NO: 1854 - protein, 3 aa, Artificial Sequence
  Synthetic: VLCDR2 (IMGT) Ab52
ELS

SEQ ID NO: 1855 - protein, 9 aa, Artificial Sequence
  Synthetic: VLCDR3 (IMGT) Ab52
MQYIEAPLT

SEQ ID NO: 1856 - protein, 8 aa, Artificial Sequence
  Synthetic: VHCDR1 (IMGT) Ab53
GFTFSSYA

SEQ ID NO: 1857 - protein, 8 aa, Artificial Sequence
  Synthetic: VHCDR2 (IMGT) Ab53
ISYDGSNK

SEQ ID NO: 1858 - protein, 17 aa, Artificial Sequence
  Synthetic: VHCDR3 (IMGT) Ab53
VRGAGQGFPYGPDGFDI

SEQ ID NO: 1859 - protein, 11 aa, Artificial Sequence
  Synthetic: VLCDR1 (IMGT) Ab53
RSLLHSDGKTY

SEQ ID NO: 1860 - protein, 3 aa, Artificial Sequence
  Synthetic: VLCDR2 (IMGT) Ab53
ELS

SEQ ID NO: 1861 - protein, 9 aa, Artificial Sequence
  Synthetic: VLCDR3 (IMGT) Ab53
MQYIEAPLT

SEQ ID NO: 1862 - protein, 8 aa, Artificial Sequence
  Synthetic: VHCDR1 (IMGT) Ab54
GFTFSSYA

SEQ ID NO: 1863 - protein, 8 aa, Artificial Sequence
  Synthetic: VHCDR2 (IMGT) Ab54
ISYDGSNK

SEQ ID NO: 1864 - protein, 17 aa, Artificial Sequence
  Synthetic: VHCDR3 (IMGT) Ab54
VRGAGQGYPYGPDGFDI

SEQ ID NO: 1865 - protein, 11 aa, Artificial Sequence
  Synthetic: VLCDR1 (IMGT) Ab54
RSLLHSDGKTY

SEQ ID NO: 1866 - protein, 3 aa, Artificial Sequence
  Synthetic: VLCDR2 (IMGT) Ab54
ELS

SEQ ID NO: 1867 - protein, 9 aa, Artificial Sequence
  Synthetic: VLCDR3 (IMGT) Ab54
MQYIEAPLT

SEQ ID NO: 1868 - protein, 8 aa, Artificial Sequence
  Synthetic: VHCDR1 (IMGT) Ab55
GFTFSSYA

SEQ ID NO: 1869 - protein, 8 aa, Artificial Sequence
  Synthetic: VHCDR2 (IMGT) Ab55
ISYDGSNK

SEQ ID NO: 1870 - protein, 17 aa, Artificial Sequence
  Synthetic: VHCDR3 (IMGT) Ab55
VRGAGTGFTYGPDGFDI

SEQ ID NO: 1871 - protein, 11 aa, Artificial Sequence
  Synthetic: VLCDR1 (IMGT) Ab55
RSLLHSDGKTY

SEQ ID NO: 1872 - protein, 3 aa, Artificial Sequence
  Synthetic: VLCDR2 (IMGT) Ab55
ELS

SEQ ID NO: 1873 - protein, 9 aa, Artificial Sequence
  Synthetic: VLCDR3 (IMGT) Ab55
MQYIEAPLT

SEQ ID NO: 1874 - protein, 8 aa, Artificial Sequence
  Synthetic: VHCDR1 (IMGT) Ab56
GFTFSSYA

SEQ ID NO: 1875 - protein, 8 aa, Artificial Sequence
  Synthetic: VHCDR2 (IMGT) Ab56
ISYDGSNK

SEQ ID NO: 1876 - protein, 17 aa, Artificial Sequence
  Synthetic: VHCDR3 (IMGT) Ab56
VRGAGMGLTYGPDGFDI

SEQ ID NO: 1877 - protein, 11 aa, Artificial Sequence
  Synthetic: VLCDR1 (IMGT) Ab56
RSLLHSDGKTY

SEQ ID NO: 1878 - protein, 3 aa, Artificial Sequence
  Synthetic: VLCDR2 (IMGT) Ab56
ELS

SEQ ID NO: 1879 - protein, 9 aa, Artificial Sequence
  Synthetic: VLCDR3 (IMGT) Ab56
MQYIEAPLT

SEQ ID NO: 1880 - protein, 8 aa, Artificial Sequence
  Synthetic: VHCDR1 (IMGT) Ab57
GFTFSSYA

SEQ ID NO: 1881 - protein, 8 aa, Artificial Sequence
  Synthetic: VHCDR2 (IMGT) Ab57
ISYDGSNK

SEQ ID NO: 1882 - protein, 17 aa, Artificial Sequence
  Synthetic: VHCDR3 (IMGT) Ab57
VRGAGLGFPYGPDGFDI

SEQ ID NO: 1883 - protein, 11 aa, Artificial Sequence
  Synthetic: VLCDR1 (IMGT) Ab57
RSLLHSDGKTY

SEQ ID NO: 1884 - protein, 3 aa, Artificial Sequence
  Synthetic: VLCDR2 (IMGT) Ab57
ELS

SEQ ID NO: 1885 - protein, 9 aa, Artificial Sequence
  Synthetic: VLCDR3 (IMGT) Ab57
MQYIEAPLT

SEQ ID NO: 1886 - protein, 8 aa, Artificial Sequence
  Synthetic: VHCDR1 (IMGT) Ab58
GFTFSSYA

SEQ ID NO: 1887 - protein, 8 aa, Artificial Sequence
  Synthetic: VHCDR2 (IMGT) Ab58
ISYDGSNK

SEQ ID NO: 1888 - protein, 17 aa, Artificial Sequence
  Synthetic: VHCDR3 (IMGT) Ab58
VRGAGLGWAYGPDGFDI

SEQ ID NO: 1889 - protein, 11 aa, Artificial Sequence
  Synthetic: VLCDR1 (IMGT) Ab58
RSLLHSDGKTY

SEQ ID NO: 1890 - protein, 3 aa, Artificial Sequence
  Synthetic: VLCDR2 (IMGT) Ab58
ELS

SEQ ID NO: 1891 - protein, 9 aa, Artificial Sequence
  Synthetic: VLCDR3 (IMGT) Ab58
MQYIEAPLT

SEQ ID NO: 1892 - protein, 8 aa, Artificial Sequence
  Synthetic: VHCDR1 (IMGT) Ab59
GFTFSSYA

SEQ ID NO: 1893 - protein, 8 aa, Artificial Sequence
  Synthetic: VHCDR2 (IMGT) Ab59
ISYDGSNK

SEQ ID NO: 1894 - protein, 17 aa, Artificial Sequence
  Synthetic: VHCDR3 (IMGT) Ab59
VRGAGRGYPYGPDGFDI

SEQ ID NO: 1895 - protein, 11 aa, Artificial Sequence
  Synthetic: VLCDR1 (IMGT) Ab59
RSLLHSDGKTY

SEQ ID NO: 1896 - protein, 3 aa, Artificial Sequence
  Synthetic: VLCDR2 (IMGT) Ab59
ELS

SEQ ID NO: 1897 - protein, 9 aa, Artificial Sequence
  Synthetic: VLCDR3 (IMGT) Ab59
MQYIEAPLT

SEQ ID NO: 1898 - protein, 8 aa, Artificial Sequence
  Synthetic: VHCDR1 (IMGT) Ab60
GFDFAGYA

SEQ ID NO: 1899 - protein, 8 aa, Artificial Sequence
  Synthetic: VHCDR2 (IMGT) Ab60
ISYDGSNK

SEQ ID NO: 1900 - protein, 17 aa, Artificial Sequence
  Synthetic: VHCDR3 (IMGT) Ab60
VRGAGRGLTYGPDGFDI

SEQ ID NO: 1901 - protein, 11 aa, Artificial Sequence
  Synthetic: VLCDR1 (IMGT) Ab60
RSLLHSDGKTY

SEQ ID NO: 1902 - protein, 3 aa, Artificial Sequence
  Synthetic: VLCDR2 (IMGT) Ab60
ELS

SEQ ID NO: 1903 - protein, 9 aa, Artificial Sequence
  Synthetic: VLCDR3 (IMGT) Ab60
MQYIEAPLT

SEQ ID NO: 1904 - protein, 8 aa, Artificial Sequence
  Synthetic: VHCDR1 (IMGT) Ab61
GFTFSSYA

SEQ ID NO: 1905 - protein, 8 aa, Artificial Sequence
  Synthetic: VHCDR2 (IMGT) Ab61
ISYDGSNK

SEQ ID NO: 1906 - protein, 17 aa, Artificial Sequence
  Synthetic: VHCDR3 (IMGT) Ab61
VRGAGLGLTYGPDGFDI

SEQ ID NO: 1907 - protein, 11 aa, Artificial Sequence
  Synthetic: VLCDR1 (IMGT) Ab61
RSLLHSDGKTY

SEQ ID NO: 1908 - protein, 3 aa, Artificial Sequence
  Synthetic: VLCDR2 (IMGT) Ab61
ELS

SEQ ID NO: 1909 - protein, 9 aa, Artificial Sequence
  Synthetic: VLCDR3 (IMGT) Ab61
MQYIEAPLT

SEQ ID NO: 1910 - protein, 8 aa, Artificial Sequence
  Synthetic: VHCDR1 (IMGT) Ab62
GFTFSSYA

SEQ ID NO: 1911 - protein, 8 aa, Artificial Sequence
  Synthetic: VHCDR2 (IMGT) Ab62
ISYDGSNK

SEQ ID NO: 1912 - protein, 17 aa, Artificial Sequence
  Synthetic: VHCDR3 (IMGT) Ab62
VRGAGLGYPYGPDGFDI

SEQ ID NO: 1913 - protein, 11 aa, Artificial Sequence
  Synthetic: VLCDR1 (IMGT) Ab62
RSLLHSDGKTY

SEQ ID NO: 1914 - protein, 3 aa, Artificial Sequence
  Synthetic: VLCDR2 (IMGT) Ab62
ELS

SEQ ID NO: 1915 - protein, 9 aa, Artificial Sequence
  Synthetic: VLCDR3 (IMGT) Ab62
MQYIEAPLT

SEQ ID NO: 1916 - protein, 8 aa, Artificial Sequence
  Synthetic: VHCDR1 (IMGT) Ab63
GFTFSSYA

SEQ ID NO: 1917 - protein, 8 aa, Artificial Sequence
  Synthetic: VHCDR2 (IMGT) Ab63
ISYDGSNK

SEQ ID NO: 1918 - protein, 17 aa, Artificial Sequence
  Synthetic: VHCDR3 (IMGT) Ab63
VRGAGRGYPHGPDGFDI

SEQ ID NO: 1919 - protein, 11 aa, Artificial Sequence
  Synthetic: VLCDR1 (IMGT) Ab63
RSLLHSDGKTY

SEQ ID NO: 1920 - protein, 3 aa, Artificial Sequence
  Synthetic: VLCDR2 (IMGT) Ab63
ELS

SEQ ID NO: 1921 - protein, 9 aa, Artificial Sequence
  Synthetic: VLCDR3 (IMGT) Ab63
MQYIEAPLT

SEQ ID NO: 1922 - protein, 8 aa, Artificial Sequence
  Synthetic: VHCDR1 (IMGT) Ab64
GFTFSSYA

SEQ ID NO: 1923 - protein, 8 aa, Artificial Sequence
  Synthetic: VHCDR2 (IMGT) Ab64
ISYDGSNK

SEQ ID NO: 1924 - protein, 17 aa, Artificial Sequence
  Synthetic: VHCDR3 (IMGT) Ab64
VRGAGIGYPHGPDGFDI

SEQ ID NO: 1925 - protein, 11 aa, Artificial Sequence
  Synthetic: VLCDR1 (IMGT) Ab64
RSLLHSDGKTY

SEQ ID NO: 1926 - protein, 3 aa, Artificial Sequence
  Synthetic: VLCDR2 (IMGT) Ab64
ELS

SEQ ID NO: 1927 - protein, 9 aa, Artificial Sequence
  Synthetic: VLCDR3 (IMGT) Ab64
MQYIEAPLT

SEQ ID NO: 1928 - protein, 8 aa, Artificial Sequence
  Synthetic: VHCDR1 (IMGT) Ab65
GFTFSSYA

SEQ ID NO: 1929 - protein, 8 aa, Artificial Sequence
  Synthetic: VHCDR2 (IMGT) Ab65
ISYDGSNK

SEQ ID NO: 1930 - protein, 17 aa, Artificial Sequence
  Synthetic: VHCDR3 (IMGT) Ab65
VRGAGRGYPYGPDGFDI

SEQ ID NO: 1931 - protein, 11 aa, Artificial Sequence
  Synthetic: VLCDR1 (IMGT) Ab65
RSLLHSDGKTY

SEQ ID NO: 1932 - protein, 3 aa, Artificial Sequence
  Synthetic: VLCDR2 (IMGT) Ab65
ELS

SEQ ID NO: 1933 - protein, 9 aa, Artificial Sequence
  Synthetic: VLCDR3 (IMGT) Ab65
MQYIEAPLT

SEQ ID NO: 1934 - protein, 8 aa, Artificial Sequence
  Synthetic: VHCDR1 (IMGT) Ab66
GFTFSSYA

SEQ ID NO: 1935 - protein, 8 aa, Artificial Sequence
  Synthetic: VHCDR2 (IMGT) Ab66
ISYDGSNK

SEQ ID NO: 1936 - protein, 17 aa, Artificial Sequence
  Synthetic: VHCDR3 (IMGT) Ab66
VRGAGLGFPFGPDGFDI

SEQ ID NO: 1937 - protein, 11 aa, Artificial Sequence
  Synthetic: VLCDR1 (IMGT) Ab66
RSLLHSDGKTY

SEQ ID NO: 1938 - protein, 3 aa, Artificial Sequence
  Synthetic: VLCDR2 (IMGT) Ab66
ELS

SEQ ID NO: 1939 - protein, 9 aa, Artificial Sequence
  Synthetic: VLCDR3 (IMGT) Ab66
MQYIEAPLT

SEQ ID NO: 1940 - protein, 8 aa, Artificial Sequence
  Synthetic: VHCDR1 (IMGT) Ab67
GFTFSSYA

SEQ ID NO: 1941 - protein, 8 aa, Artificial Sequence
  Synthetic: VHCDR2 (IMGT) Ab67
ISYDGSNK

SEQ ID NO: 1942 - protein, 17 aa, Artificial Sequence
  Synthetic: VHCDR3 (IMGT) Ab67
VRGAGRGFPYGPDGFDI

SEQ ID NO: 1943 - protein, 11 aa, Artificial Sequence
  Synthetic: VLCDR1 (IMGT) Ab67
RSLLHSDGKTY

SEQ ID NO: 1944 - protein, 3 aa, Artificial Sequence
  Synthetic: VLCDR2 (IMGT) Ab67
ELS

SEQ ID NO: 1945 - protein, 9 aa, Artificial Sequence
  Synthetic: VLCDR3 (IMGT) Ab67
MQYIEAPLT

SEQ ID NO: 1946 - protein, 8 aa, Artificial Sequence
  Synthetic: VHCDR1 (IMGT) Ab68
GFTFSSYA

SEQ ID NO: 1947 - protein, 8 aa, Artificial Sequence
  Synthetic: VHCDR2 (IMGT) Ab68
ISYDGSNK

SEQ ID NO: 1948 - protein, 17 aa, Artificial Sequence
  Synthetic: VHCDR3 (IMGT) Ab68
VRGAGLGYPNGPDGFDI

SEQ ID NO: 1949 - protein, 11 aa, Artificial Sequence
  Synthetic: VLCDR1 (IMGT) Ab68
RSLLHSDGKTY

SEQ ID NO: 1950 - protein, 3 aa, Artificial Sequence
  Synthetic: VLCDR2 (IMGT) Ab68
ELS

SEQ ID NO: 1951 - protein, 9 aa, Artificial Sequence
  Synthetic: VLCDR3 (IMGT) Ab68
MQYIEAPLT

SEQ ID NO: 1952 - protein, 8 aa, Artificial Sequence
  Synthetic: VHCDR1 (IMGT) Ab69
GFTFSSYA

SEQ ID NO: 1953 - protein, 8 aa, Artificial Sequence
  Synthetic: VHCDR2 (IMGT) Ab69
ISYDGSNK

SEQ ID NO: 1954 - protein, 17 aa, Artificial Sequence
  Synthetic: VHCDR3 (IMGT) Ab69
VRGAGQGFPYGPDGFDI

SEQ ID NO: 1955 - protein, 11 aa, Artificial Sequence
  Synthetic: VLCDR1 (IMGT) Ab69
RSLLHSDGKTY

SEQ ID NO: 1956 - protein, 3 aa, Artificial Sequence
  Synthetic: VLCDR2 (IMGT) Ab69
ELS

SEQ ID NO: 1957 - protein, 9 aa, Artificial Sequence
  Synthetic: VLCDR3 (IMGT) Ab69
MQYIEAPLT

SEQ ID NO: 1958 - protein, 8 aa, Artificial Sequence
  Synthetic: VHCDR1 (IMGT) Ab70
GFTFSSYA

SEQ ID NO: 1959 - protein, 8 aa, Artificial Sequence
  Synthetic: VHCDR2 (IMGT) Ab70
ISYDGSNK

SEQ ID NO: 1960 - protein, 17 aa, Artificial Sequence
  Synthetic: VHCDR3 (IMGT) Ab70
VRGAGQGYPYGPDGFDI

SEQ ID NO: 1961 - protein, 11 aa, Artificial Sequence
  Synthetic: VLCDR1 (IMGT) Ab70
RSLLHSDGKTY

SEQ ID NO: 1962 - protein, 3 aa, Artificial Sequence
  Synthetic: VLCDR2 (IMGT) Ab70
ELS

SEQ ID NO: 1963 - protein, 9 aa, Artificial Sequence
  Synthetic: VLCDR3 (IMGT) Ab70
MQYIEAPLT

SEQ ID NO: 1964 - protein, 8 aa, Artificial Sequence
  Synthetic: VHCDR1 (IMGT) Ab71
GFTFSSYA

SEQ ID NO: 1965 - protein, 8 aa, Artificial Sequence
  Synthetic: VHCDR2 (IMGT) Ab71
ISYDGSNK

SEQ ID NO: 1966 - protein, 17 aa, Artificial Sequence
  Synthetic: VHCDR3 (IMGT) Ab71
VRGAGTGFTYGPDGFDI

SEQ ID NO: 1967 - protein, 11 aa, Artificial Sequence
  Synthetic: VLCDR1 (IMGT) Ab71
RSLLHSDGKTY

SEQ ID NO: 1968 - protein, 3 aa, Artificial Sequence
  Synthetic: VLCDR2 (IMGT) Ab71
ELS

SEQ ID NO: 1969 - protein, 9 aa, Artificial Sequence
  Synthetic: VLCDR3 (IMGT) Ab71
MQYIEAPLT

SEQ ID NO: 1970 - protein, 8 aa, Artificial Sequence
  Synthetic: VHCDR1 (IMGT) Ab72
GFTFSSYA

SEQ ID NO: 1971 - protein, 8 aa, Artificial Sequence
  Synthetic: VHCDR2 (IMGT) Ab72
ISYDGSNK

SEQ ID NO: 1972 - protein, 17 aa, Artificial Sequence
  Synthetic: VHCDR3 (IMGT) Ab72
VRGAGMGLTYGPDGFDI

SEQ ID NO: 1973 - protein, 11 aa, Artificial Sequence
  Synthetic: VLCDR1 (IMGT) Ab72
RSLLHSDGKTY

SEQ ID NO: 1974 - protein, 3 aa, Artificial Sequence
  Synthetic: VLCDR2 (IMGT) Ab72
ELS

SEQ ID NO: 1975 - protein, 9 aa, Artificial Sequence
  Synthetic: VLCDR3 (IMGT) Ab72
MQYIEAPLT

SEQ ID NO: 1976 - protein, 8 aa, Artificial Sequence
  Synthetic: VHCDR1 (IMGT) Ab73
GFTFSSYA

SEQ ID NO: 1977 - protein, 8 aa, Artificial Sequence
  Synthetic: VHCDR2 (IMGT) Ab73
ISYDGSNK

SEQ ID NO: 1978 - protein, 17 aa, Artificial Sequence
  Synthetic: VHCDR3 (IMGT) Ab73
VRGAGLGFPYGPDGFDI

SEQ ID NO: 1979 - protein, 11 aa, Artificial Sequence
  Synthetic: VLCDR1 (IMGT) Ab73
RSLLHSDGKTY

SEQ ID NO: 1980 - protein, 3 aa, Artificial Sequence
  Synthetic: VLCDR2 (IMGT) Ab73
ELS

SEQ ID NO: 1981 - protein, 9 aa, Artificial Sequence
  Synthetic: VLCDR3 (IMGT) Ab73
MQYIEAPLT

SEQ ID NO: 1982 - protein, 8 aa, Artificial Sequence
  Synthetic: VHCDR1 (IMGT) Ab74
GFTFSSYA

SEQ ID NO: 1983 - protein, 8 aa, Artificial Sequence
  Synthetic: VHCDR2 (IMGT) Ab74
ISYDGSNK

SEQ ID NO: 1984 - protein, 17 aa, Artificial Sequence
  Synthetic: VHCDR3 (IMGT) Ab74
VRGAGLGWAYGPDGFDI

SEQ ID NO: 1985 - protein, 11 aa, Artificial Sequence
  Synthetic: VLCDR1 (IMGT) Ab74
RSLLHSDGKTY

SEQ ID NO: 1986 - protein, 3 aa, Artificial Sequence
  Synthetic: VLCDR2 (IMGT) Ab74
ELS

SEQ ID NO: 1987 - protein, 9 aa, Artificial Sequence
  Synthetic: VLCDR3 (IMGT) Ab74
MQYIEAPLT

SEQ ID NO: 1988 - protein, 8 aa, Artificial Sequence
  Synthetic: VHCDR1 (IMGT) Ab75
GFTFSSYA

SEQ ID NO: 1989 - protein, 8 aa, Artificial Sequence
  Synthetic: VHCDR2 (IMGT) Ab75
ISYDGSNK

SEQ ID NO: 1990 - protein, 17 aa, Artificial Sequence
  Synthetic: VHCDR3 (IMGT) Ab75
VRGAGRGYPYGPDGFDI

SEQ ID NO: 1991 - protein, 11 aa, Artificial Sequence
  Synthetic: VLCDR1 (IMGT) Ab75
RSLLHSDGKTY

SEQ ID NO: 1992 - protein, 3 aa, Artificial Sequence
  Synthetic: VLCDR2 (IMGT) Ab75
ELS

SEQ ID NO: 1993 - protein, 9 aa, Artificial Sequence
  Synthetic: VLCDR3 (IMGT) Ab75
MQYIEAPLT

SEQ ID NO: 1994 - protein, 8 aa, Artificial Sequence
  Synthetic: VHCDR1 (IMGT) Ab76
GFDFAGYA

SEQ ID NO: 1995 - protein, 8 aa, Artificial Sequence
  Synthetic: VHCDR2 (IMGT) Ab76
ISYDGSNK

SEQ ID NO: 1996 - protein, 17 aa, Artificial Sequence
  Synthetic: VHCDR3 (IMGT) Ab76
VRGAGRGLTYGPDGFDI

SEQ ID NO: 1997 - protein, 11 aa, Artificial Sequence
  Synthetic: VLCDR1 (IMGT) Ab76
RSLLHSDGKTY

SEQ ID NO: 1998 - protein, 3 aa, Artificial Sequence
  Synthetic: VLCDR2 (IMGT) Ab76
ELS

SEQ ID NO: 1999 - protein, 9 aa, Artificial Sequence
  Synthetic: VLCDR3 (IMGT) Ab76
MQYIEAPLT

SEQ ID NO: 2000 - protein, 8 aa, Artificial Sequence
  Synthetic: VHCDR1 (IMGT) Ab77
GFTFSSYA

SEQ ID NO: 2001 - protein, 8 aa, Artificial Sequence
  Synthetic: VHCDR2 (IMGT) Ab77
ISYDGSNK

SEQ ID NO: 2002 - protein, 17 aa, Artificial Sequence
  Synthetic: VHCDR3 (IMGT) Ab77
VRGAGLGLTYGPDGFDI

SEQ ID NO: 2003 - protein, 11 aa, Artificial Sequence
  Synthetic: VLCDR1 (IMGT) Ab77
RSLLHSDGKTY

SEQ ID NO: 2004 - protein, 3 aa, Artificial Sequence
  Synthetic: VLCDR2 (IMGT) Ab77
ELS

SEQ ID NO: 2005 - protein, 9 aa, Artificial Sequence
  Synthetic: VLCDR3 (IMGT) Ab77
MQYIEAPLT

SEQ ID NO: 2006 - protein, 8 aa, Artificial Sequence
  Synthetic: VHCDR1 (IMGT) Ab78
GFTFSSYA

SEQ ID NO: 2007 - protein, 8 aa, Artificial Sequence
  Synthetic: VHCDR2 (IMGT) Ab78
ISYDGSNK

SEQ ID NO: 2008 - protein, 17 aa, Artificial Sequence
  Synthetic: VHCDR3 (IMGT) Ab78
VRGAGLGYPYGPDGFDI

SEQ ID NO: 2009 - protein, 11 aa, Artificial Sequence
  Synthetic: VLCDR1 (IMGT) Ab78
RSLLHSDGKTY

SEQ ID NO: 2010 - protein, 3 aa, Artificial Sequence
  Synthetic: VLCDR2 (IMGT) Ab78
ELS

SEQ ID NO: 2011 - protein, 9 aa, Artificial Sequence
  Synthetic: VLCDR3 (IMGT) Ab78
MQYIEAPLT

SEQ ID NO: 2012 - protein, 8 aa, Artificial Sequence
  Synthetic: VHCDR1 (IMGT) Ab79
GFTFSSYA

SEQ ID NO: 2013 - protein, 8 aa, Artificial Sequence
  Synthetic: VHCDR2 (IMGT) Ab79
ISYDGSNK

SEQ ID NO: 2014 - protein, 17 aa, Artificial Sequence
  Synthetic: VHCDR3 (IMGT) Ab79
VRGAGRGYPHGPDGFDI

SEQ ID NO: 2015 - protein, 11 aa, Artificial Sequence
  Synthetic: VLCDR1 (IMGT) Ab79
RSLLHSDGKTY

SEQ ID NO: 2016 - protein, 3 aa, Artificial Sequence
  Synthetic: VLCDR2 (IMGT) Ab79
ELS

SEQ ID NO: 2017 - protein, 9 aa, Artificial Sequence
  Synthetic: VLCDR3 (IMGT) Ab79
MQYIEAPLT

SEQ ID NO: 2018 - protein, 8 aa, Artificial Sequence
  Synthetic: VHCDR1 (IMGT) Ab80
GFTFSSYA

SEQ ID NO: 2019 - protein, 8 aa, Artificial Sequence
  Synthetic: VHCDR2 (IMGT) Ab80
ISYDGSNK

SEQ ID NO: 2020 - protein, 17 aa, Artificial Sequence
  Synthetic: VHCDR3 (IMGT) Ab80
VRGAGIGYPHGPDGFDI

SEQ ID NO: 2021 - protein, 11 aa, Artificial Sequence
  Synthetic: VLCDR1 (IMGT) Ab80
RSLLHSDGKTY

SEQ ID NO: 2022 - protein, 3 aa, Artificial Sequence
  Synthetic: VLCDR2 (IMGT) Ab80
ELS

SEQ ID NO: 2023 - protein, 9 aa, Artificial Sequence
  Synthetic: VLCDR3 (IMGT) Ab80
MQYIEAPLT

SEQ ID NO: 2024 - protein, 8 aa, Artificial Sequence
  Synthetic: VHCDR1 (IMGT) Ab81
GFTFSSYA

SEQ ID NO: 2025 - protein, 8 aa, Artificial Sequence
  Synthetic: VHCDR2 (IMGT) Ab81
ISYDGSNK

SEQ ID NO: 2026 - protein, 17 aa, Artificial Sequence
  Synthetic: VHCDR3 (IMGT) Ab81
VRGAGRGYPYGPDGFDI

SEQ ID NO: 2027 - protein, 11 aa, Artificial Sequence
  Synthetic: VLCDR1 (IMGT) Ab81
RSLLHSDGKTY

SEQ ID NO: 2028 - protein, 3 aa, Artificial Sequence
  Synthetic: VLCDR2 (IMGT) Ab81
ELS

SEQ ID NO: 2029 - protein, 9 aa, Artificial Sequence
  Synthetic: VLCDR3 (IMGT) Ab81
MQYIEAPLT

SEQ ID NO: 2030 - protein, 8 aa, Artificial Sequence
  Synthetic: VHCDR1 (IMGT) Ab82
GFTFSSYA

SEQ ID NO: 2031 - protein, 8 aa, Artificial Sequence
  Synthetic: VHCDR2 (IMGT) Ab82
ISYDGSNK

SEQ ID NO: 2032 - protein, 17 aa, Artificial Sequence
  Synthetic: VHCDR3 (IMGT) Ab82
VRGAGLGFPFGPDGFDI

SEQ ID NO: 2033 - protein, 11 aa, Artificial Sequence
  Synthetic: VLCDR1 (IMGT) Ab82
RSLLHSDGKTY

SEQ ID NO: 2034 - protein, 3 aa, Artificial Sequence
  Synthetic: VLCDR2 (IMGT) Ab82
ELS

SEQ ID NO: 2035 - protein, 9 aa, Artificial Sequence
  Synthetic: VLCDR3 (IMGT) Ab82
MQYIEAPLT

SEQ ID NO: 2036 - protein, 8 aa, Artificial Sequence
  Synthetic: VHCDR1 (IMGT) Ab83
GFTFSSYA

SEQ ID NO: 2037 - protein, 8 aa, Artificial Sequence
  Synthetic: VHCDR2 (IMGT) Ab83
ISYDGSNK

SEQ ID NO: 2038 - protein, 17 aa, Artificial Sequence
  Synthetic: VHCDR3 (IMGT) Ab83
VRGAGRGFPYGPDGFDI

SEQ ID NO: 2039 - protein, 11 aa, Artificial Sequence
  Synthetic: VLCDR1 (IMGT) Ab83
RSLLHSDGKTY

SEQ ID NO: 2040 - protein, 3 aa, Artificial Sequence
  Synthetic: VLCDR2 (IMGT) Ab83
ELS

SEQ ID NO: 2041 - protein, 9 aa, Artificial Sequence
  Synthetic: VLCDR3 (IMGT) Ab83
MQYIEAPLT

SEQ ID NO: 2042 - protein, 8 aa, Artificial Sequence
  Synthetic: VHCDR1 (IMGT) Ab84
GFTFSSYA

SEQ ID NO: 2043 - protein, 8 aa, Artificial Sequence
  Synthetic: VHCDR2 (IMGT) Ab84
ISYDGSNK

SEQ ID NO: 2044 - protein, 17 aa, Artificial Sequence
  Synthetic: VHCDR3 (IMGT) Ab84
VRGAGLGYPNGPDGFDI

SEQ ID NO: 2045 - protein, 11 aa, Artificial Sequence
  Synthetic: VLCDR1 (IMGT) Ab84
RSLLHSDGKTY

SEQ ID NO: 2046 - protein, 3 aa, Artificial Sequence
  Synthetic: VLCDR2 (IMGT) Ab84
ELS

SEQ ID NO: 2047 - protein, 9 aa, Artificial Sequence
  Synthetic: VLCDR3 (IMGT) Ab84
MQYIEAPLT

SEQ ID NO: 2048 - protein, 8 aa, Artificial Sequence
  Synthetic: VHCDR1 (IMGT) Ab85
GFTFSSYA

SEQ ID NO: 2049 - protein, 8 aa, Artificial Sequence
  Synthetic: VHCDR2 (IMGT) Ab85
ISYDGSNK

SEQ ID NO: 2050 - protein, 17 aa, Artificial Sequence
  Synthetic: VHCDR3 (IMGT) Ab85
VRGAGQGFPYGPDGFDI

SEQ ID NO: 2051 - protein, 11 aa, Artificial Sequence
  Synthetic: VLCDR1 (IMGT) Ab85
RSLLHSDGKTY

SEQ ID NO: 2052 - protein, 3 aa, Artificial Sequence
  Synthetic: VLCDR2 (IMGT) Ab85
ELS

SEQ ID NO: 2053 - protein, 9 aa, Artificial Sequence
  Synthetic: VLCDR3 (IMGT) Ab85
MQYIEAPLT

SEQ ID NO: 2054 - protein, 8 aa, Artificial Sequence
  Synthetic: VHCDR1 (IMGT) Ab86
GFTFSSYA

SEQ ID NO: 2055 - protein, 8 aa, Artificial Sequence
  Synthetic: VHCDR2 (IMGT) Ab86
ISYDGSNK

SEQ ID NO: 2056 - protein, 17 aa, Artificial Sequence
  Synthetic: VHCDR3 (IMGT) Ab86
VRGAGRGLTYGPDGFDI

SEQ ID NO: 2057 - protein, 11 aa, Artificial Sequence
  Synthetic: VLCDR1 (IMGT) Ab86
RSLLWSDGKTY

SEQ ID NO: 2058 - protein, 3 aa, Artificial Sequence
  Synthetic: VLCDR2 (IMGT) Ab86
ELS

SEQ ID NO: 2059 - protein, 9 aa, Artificial Sequence
  Synthetic: VLCDR3 (IMGT) Ab86
MQYIEAPLT

SEQ ID NO: 2060 - protein, 8 aa, Artificial Sequence
  Synthetic: VHCDR1 (IMGT) Ab87
GFTFSSYA

SEQ ID NO: 2061 - protein, 8 aa, Artificial Sequence
  Synthetic: VHCDR2 (IMGT) Ab87
ISYDGSNK

SEQ ID NO: 2062 - protein, 17 aa, Artificial Sequence
  Synthetic: VHCDR3 (IMGT) Ab87
VRGAGRGFTWGPDGFDI

SEQ ID NO: 2063 - protein, 11 aa, Artificial Sequence
  Synthetic: VLCDR1 (IMGT) Ab87
RSLLHSDGKTY

SEQ ID NO: 2064 - protein, 3 aa, Artificial Sequence
  Synthetic: VLCDR2 (IMGT) Ab87
ELS

SEQ ID NO: 2065 - protein, 9 aa, Artificial Sequence
  Synthetic: VLCDR3 (IMGT) Ab87
MQYVEAPLT

SEQ ID NO: 2066 - protein, 8 aa, Artificial Sequence
  Synthetic: VHCDR1 (IMGT) Ab88
GFTFSSYA

SEQ ID NO: 2067 - protein, 8 aa, Artificial Sequence
  Synthetic: VHCDR2 (IMGT) Ab88
ISYDGSNK

SEQ ID NO: 2068 - protein, 17 aa, Artificial Sequence
  Synthetic: VHCDR3 (IMGT) Ab88
VRGAGRGLTYGPDGFDI

SEQ ID NO: 2069 - protein, 11 aa, Artificial Sequence
  Synthetic: VLCDR1 (IMGT) Ab88
RSLLHSDGKTY

SEQ ID NO: 2070 - protein, 3 aa, Artificial Sequence
  Synthetic: VLCDR2 (IMGT) Ab88
ELS

SEQ ID NO: 2071 - protein, 9 aa, Artificial Sequence
  Synthetic: VLCDR3 (IMGT) Ab88
MQYIEAPLT

SEQ ID NO: 2072 - protein, 8 aa, Artificial Sequence
  Synthetic: VHCDR1 (IMGT) Ab89
GFTFSSYA

SEQ ID NO: 2073 - protein, 8 aa, Artificial Sequence
  Synthetic: VHCDR2 (IMGT) Ab89
ISYDGSNK

SEQ ID NO: 2074 - protein, 17 aa, Artificial Sequence
  Synthetic: VHCDR3 (IMGT) Ab89
VRGAGRGFPYGPDGFDI

SEQ ID NO: 2075 - protein, 11 aa, Artificial Sequence
  Synthetic: VLCDR1 (IMGT) Ab89
RSLLHSDGKTY

SEQ ID NO: 2076 - protein, 3 aa, Artificial Sequence
  Synthetic: VLCDR2 (IMGT) Ab89
ELS

SEQ ID NO: 2077 - protein, 9 aa, Artificial Sequence
  Synthetic: VLCDR3 (IMGT) Ab89
MQYIEVPLT

SEQ ID NO: 2078 - protein, 8 aa, Artificial Sequence
  Synthetic: VHCDR1 (IMGT) Ab90
GFTFSSYA

SEQ ID NO: 2079 - protein, 8 aa, Artificial Sequence
  Synthetic: VHCDR2 (IMGT) Ab90
ISYDGSNK

SEQ ID NO: 2080 - protein, 17 aa, Artificial Sequence
  Synthetic: VHCDR3 (IMGT) Ab90
VRGAGRGYPYGPDGFDI

SEQ ID NO: 2081 - protein, 11 aa, Artificial Sequence
  Synthetic: VLCDR1 (IMGT) Ab90
RSLLHSDGKTY

SEQ ID NO: 2082 - protein, 3 aa, Artificial Sequence
  Synthetic: VLCDR2 (IMGT) Ab90
ELS

SEQ ID NO: 2083 - protein, 9 aa, Artificial Sequence
  Synthetic: VLCDR3 (IMGT) Ab90
MQYVEVPLT

SEQ ID NO: 2084 - protein, 8 aa, Artificial Sequence
  Synthetic: VHCDR1 (IMGT) Ab91
GFTFSSYA

SEQ ID NO: 2085 - protein, 8 aa, Artificial Sequence
  Synthetic: VHCDR2 (IMGT) Ab91
ISYDGSNK

SEQ ID NO: 2086 - protein, 17 aa, Artificial Sequence
  Synthetic: VHCDR3 (IMGT) Ab91
VRGAGQGYMHGPDGFDI

SEQ ID NO: 2087 - protein, 11 aa, Artificial Sequence
  Synthetic: VLCDR1 (IMGT) Ab91
RSLLWSDGKTY

SEQ ID NO: 2088 - protein, 3 aa, Artificial Sequence
  Synthetic: VLCDR2 (IMGT) Ab91
ELS

SEQ ID NO: 2089 - protein, 9 aa, Artificial Sequence
  Synthetic: VLCDR3 (IMGT) Ab91
MQYIEAPLT

SEQ ID NO: 2090 - protein, 8 aa, Artificial Sequence
  Synthetic: VHCDR1 (IMGT) Ab92
GFTFSSYA

SEQ ID NO: 2091 - protein, 8 aa, Artificial Sequence
  Synthetic: VHCDR2 (IMGT) Ab92
ISYDGSNK

SEQ ID NO: 2092 - protein, 17 aa, Artificial Sequence
  Synthetic: VHCDR3 (IMGT) Ab92
VRGAGHGFPTGPDGFDI

SEQ ID NO: 2093 - protein, 11 aa, Artificial Sequence
  Synthetic: VLCDR1 (IMGT) Ab92
RSLLHSDGKTY

SEQ ID NO: 2094 - protein, 3 aa, Artificial Sequence
  Synthetic: VLCDR2 (IMGT) Ab92
ELS

SEQ ID NO: 2095 - protein, 9 aa, Artificial Sequence
  Synthetic: VLCDR3 (IMGT) Ab92
MQYVEAPLT

SEQ ID NO: 2096 - protein, 8 aa, Artificial Sequence
  Synthetic: VHCDR1 (IMGT) Ab93
GFTFSSYA

SEQ ID NO: 2097 - protein, 8 aa, Artificial Sequence
  Synthetic: VHCDR2 (IMGT) Ab93
ISYDGSNK

SEQ ID NO: 2098 - protein, 17 aa, Artificial Sequence
  Synthetic: VHCDR3 (IMGT) Ab93
VRGAGLGFPYGPDGFDI

SEQ ID NO: 2099 - protein, 11 aa, Artificial Sequence
  Synthetic: VLCDR1 (IMGT) Ab93
RSLLHSDGKTY

SEQ ID NO: 2100 - protein, 3 aa, Artificial Sequence
  Synthetic: VLCDR2 (IMGT) Ab93
ELS

SEQ ID NO: 2101 - protein, 9 aa, Artificial Sequence
  Synthetic: VLCDR3 (IMGT) Ab93
MQYIEAPLT

SEQ ID NO: 2102 - protein, 8 aa, Artificial Sequence
  Synthetic: VHCDR1 (IMGT) Ab94
GFTFSSYA

SEQ ID NO: 2103 - protein, 8 aa, Artificial Sequence
  Synthetic: VHCDR2 (IMGT) Ab94
ISYDGSNK

SEQ ID NO: 2104 - protein, 17 aa, Artificial Sequence
  Synthetic: VHCDR3 (IMGT) Ab94
VRGAGLGWPYGPDGFDI

SEQ ID NO: 2105 - protein, 11 aa, Artificial Sequence
  Synthetic: VLCDR1 (IMGT) Ab94
RSLLHSDGKTY

SEQ ID NO: 2106 - protein, 3 aa, Artificial Sequence
  Synthetic: VLCDR2 (IMGT) Ab94
ELS

SEQ ID NO: 2107 - protein, 9 aa, Artificial Sequence
  Synthetic: VLCDR3 (IMGT) Ab94
MQYIEAPLT

SEQ ID NO: 2108 - protein, 8 aa, Artificial Sequence
  Synthetic: VHCDR1 (IMGT) Ab95
GFTFSSYA

SEQ ID NO: 2109 - protein, 8 aa, Artificial Sequence
  Synthetic: VHCDR2 (IMGT) Ab95
ISYDGSNK

SEQ ID NO: 2110 - protein, 17 aa, Artificial Sequence
  Synthetic: VHCDR3 (IMGT) Ab95
VRGAGLGWPYGPDGFDI

SEQ ID NO: 2111 - protein, 11 aa, Artificial Sequence
  Synthetic: VLCDR1 (IMGT) Ab95
RSLLHSDGKTY

SEQ ID NO: 2112 - protein, 3 aa, Artificial Sequence
  Synthetic: VLCDR2 (IMGT) Ab95
ELS

SEQ ID NO: 2113 - protein, 9 aa, Artificial Sequence
  Synthetic: VLCDR3 (IMGT) Ab95
MQYIEAPLT

SEQ ID NO: 2114 - protein, 8 aa, Artificial Sequence
  Synthetic: VHCDR1 (IMGT) Ab96
GFTFSSYA

SEQ ID NO: 2115 - protein, 8 aa, Artificial Sequence
  Synthetic: VHCDR2 (IMGT) Ab96
ISYDGSNK

SEQ ID NO: 2116 - protein, 17 aa, Artificial Sequence
  Synthetic: VHCDR3 (IMGT) Ab96
VRGAGLGWPYGPDGFDI

SEQ ID NO: 2117 - protein, 11 aa, Artificial Sequence
  Synthetic: VLCDR1 (IMGT) Ab96
RSLLHSDGKTY

SEQ ID NO: 2118 - protein, 3 aa, Artificial Sequence
  Synthetic: VLCDR2 (IMGT) Ab96
ELS

SEQ ID NO: 2119 - protein, 9 aa, Artificial Sequence
  Synthetic: VLCDR3 (IMGT) Ab96
MQYIEAPLT

SEQ ID NO: 2120 - protein, 8 aa, Artificial Sequence
  Synthetic: VHCDR1 (IMGT) Ab97
GFTFSSYA

SEQ ID NO: 2121 - protein, 8 aa, Artificial Sequence
  Synthetic: VHCDR2 (IMGT) Ab97
ISYDGSNK

SEQ ID NO: 2122 - protein, 17 aa, Artificial Sequence
  Synthetic: VHCDR3 (IMGT) Ab97
VRGAGLGWPYGPDGFDI

SEQ ID NO: 2123 - protein, 11 aa, Artificial Sequence
  Synthetic: VLCDR1 (IMGT) Ab97
RSLLHSDGKTY

SEQ ID NO: 2124 - protein, 3 aa, Artificial Sequence
  Synthetic: VLCDR2 (IMGT) Ab97
ELS

SEQ ID NO: 2125 - protein, 9 aa, Artificial Sequence
  Synthetic: VLCDR3 (IMGT) Ab97
MQYVEAPLT

SEQ ID NO: 2126 - protein, 8 aa, Artificial Sequence
  Synthetic: VHCDR1 (IMGT) Ab98
GFTFSSYA

SEQ ID NO: 2127 - protein, 8 aa, Artificial Sequence
  Synthetic: VHCDR2 (IMGT) Ab98
ISYDGSNK

SEQ ID NO: 2128 - protein, 17 aa, Artificial Sequence
  Synthetic: VHCDR3 (IMGT) Ab98
VRGAGLGWPYGPDGFDI

SEQ ID NO: 2129 - protein, 11 aa, Artificial Sequence
  Synthetic: VLCDR1 (IMGT) Ab98
RSLLHSDGKTY

SEQ ID NO: 2130 - protein, 3 aa, Artificial Sequence
  Synthetic: VLCDR2 (IMGT) Ab98
ELS

SEQ ID NO: 2131 - protein, 9 aa, Artificial Sequence
  Synthetic: VLCDR3 (IMGT) Ab98
MQYVEVPLT

SEQ ID NO: 2132 - protein, 8 aa, Artificial Sequence
  Synthetic: VHCDR1 (IMGT) Ab99
GFTFSSYA

SEQ ID NO: 2133 - protein, 8 aa, Artificial Sequence
  Synthetic: VHCDR2 (IMGT) Ab99
ISYDGSNK

SEQ ID NO: 2134 - protein, 17 aa, Artificial Sequence
  Synthetic: VHCDR3 (IMGT) Ab99
VRGAGLGWPYGPDGFDI

SEQ ID NO: 2135 - protein, 11 aa, Artificial Sequence
  Synthetic: VLCDR1 (IMGT) Ab99
RSLLWSDGKTY

SEQ ID NO: 2136 - protein, 3 aa, Artificial Sequence
  Synthetic: VLCDR2 (IMGT) Ab99
ELS

SEQ ID NO: 2137 - protein, 9 aa, Artificial Sequence
  Synthetic: VLCDR3 (IMGT) Ab99
MQYIEAPLT

SEQ ID NO: 2138 - protein, 8 aa, Artificial Sequence
  Synthetic: VHCDR1 (IMGT) Ab100
GFTFSSYA

SEQ ID NO: 2139 - protein, 8 aa, Artificial Sequence
  Synthetic: VHCDR2 (IMGT) Ab100
ISYDGSNK

SEQ ID NO: 2140 - protein, 17 aa, Artificial Sequence
  Synthetic: VHCDR3 (IMGT) Ab100
VRGAGLGWPYGPDGFDI

SEQ ID NO: 2141 - protein, 11 aa, Artificial Sequence
  Synthetic: VLCDR1 (IMGT) Ab100
RSLLWSDGKTY

SEQ ID NO: 2142 - protein, 3 aa, Artificial Sequence
  Synthetic: VLCDR2 (IMGT) Ab100
ELS

SEQ ID NO: 2143 - protein, 9 aa, Artificial Sequence
  Synthetic: VLCDR3 (IMGT) Ab100
MQYVEAPLT

SEQ ID NO: 2144 - protein, 8 aa, Artificial Sequence
  Synthetic: VHCDR1 (IMGT) Ab101
GFTFSSYA

SEQ ID NO: 2145 - protein, 8 aa, Artificial Sequence
  Synthetic: VHCDR2 (IMGT) Ab101
ISYDGSNK

SEQ ID NO: 2146 - protein, 17 aa, Artificial Sequence
  Synthetic: VHCDR3 (IMGT) Ab101
VRGAGRGFTLGPDGFDI

SEQ ID NO: 2147 - protein, 11 aa, Artificial Sequence
  Synthetic: VLCDR1 (IMGT) Ab101
RSLLHSDGKTY

SEQ ID NO: 2148 - protein, 3 aa, Artificial Sequence
  Synthetic: VLCDR2 (IMGT) Ab101
ELS

SEQ ID NO: 2149 - protein, 9 aa, Artificial Sequence
  Synthetic: VLCDR3 (IMGT) Ab101
MQYIEAPLT

SEQ ID NO: 2150 - protein, 8 aa, Artificial Sequence
  Synthetic: VHCDR1 (IMGT) Ab102
GFTFSSYA

SEQ ID NO: 2151 - protein, 8 aa, Artificial Sequence
  Synthetic: VHCDR2 (IMGT) Ab102
ISYDGSNK

SEQ ID NO: 2152 - protein, 17 aa, Artificial Sequence
  Synthetic: VHCDR3 (IMGT) Ab102
VRGAGRGFTLGPDGFDI

SEQ ID NO: 2153 - protein, 11 aa, Artificial Sequence
  Synthetic: VLCDR1 (IMGT) Ab102
RSLLHSDGKTY

SEQ ID NO: 2154 - protein, 3 aa, Artificial Sequence
  Synthetic: VLCDR2 (IMGT) Ab102
ELS

SEQ ID NO: 2155 - protein, 9 aa, Artificial Sequence
  Synthetic: VLCDR3 (IMGT) Ab102
MQYIEAPLT

SEQ ID NO: 2156 - protein, 8 aa, Artificial Sequence
  Synthetic: VHCDR1 (IMGT) Ab103
GFTFSSYA

SEQ ID NO: 2157 - protein, 8 aa, Artificial Sequence
  Synthetic: VHCDR2 (IMGT) Ab103
ISYDGSNK

SEQ ID NO: 2158 - protein, 17 aa, Artificial Sequence
  Synthetic: VHCDR3 (IMGT) Ab103
VRGAGRGFTLGPDGFDI

SEQ ID NO: 2159 - protein, 11 aa, Artificial Sequence
  Synthetic: VLCDR1 (IMGT) Ab103
RSLLHSDGKTY

SEQ ID NO: 2160 - protein, 3 aa, Artificial Sequence
  Synthetic: VLCDR2 (IMGT) Ab103
ELS

SEQ ID NO: 2161 - protein, 9 aa, Artificial Sequence
  Synthetic: VLCDR3 (IMGT) Ab103
MQYIEAPLT

SEQ ID NO: 2162 - protein, 8 aa, Artificial Sequence
  Synthetic: VHCDR1 (IMGT) Ab104
GFTFSSYA

SEQ ID NO: 2163 - protein, 8 aa, Artificial Sequence
  Synthetic: VHCDR2 (IMGT) Ab104
ISYDGSNK

SEQ ID NO: 2164 - protein, 17 aa, Artificial Sequence
  Synthetic: VHCDR3 (IMGT) Ab104
VRGAGRGFTLGPDGFDI

SEQ ID NO: 2165 - protein, 11 aa, Artificial Sequence
  Synthetic: VLCDR1 (IMGT) Ab104
RSLLHSDGKTY

SEQ ID NO: 2166 - protein, 3 aa, Artificial Sequence
  Synthetic: VLCDR2 (IMGT) Ab104
ELS

SEQ ID NO: 2167 - protein, 9 aa, Artificial Sequence
  Synthetic: VLCDR3 (IMGT) Ab104
MQYVEAPLT

SEQ ID NO: 2168 - protein, 8 aa, Artificial Sequence
  Synthetic: VHCDR1 (IMGT) Ab105
GFTFSSYA

SEQ ID NO: 2169 - protein, 8 aa, Artificial Sequence
  Synthetic: VHCDR2 (IMGT) Ab105
ISYDGSNK

SEQ ID NO: 2170 - protein, 17 aa, Artificial Sequence
  Synthetic: VHCDR3 (IMGT) Ab105
VRGAGRGFTLGPDGFDI

SEQ ID NO: 2171 - protein, 11 aa, Artificial Sequence
  Synthetic: VLCDR1 (IMGT) Ab105
RSLLHSDGKTY

SEQ ID NO: 2172 - protein, 3 aa, Artificial Sequence
  Synthetic: VLCDR2 (IMGT) Ab105
ELS

SEQ ID NO: 2173 - protein, 9 aa, Artificial Sequence
  Synthetic: VLCDR3 (IMGT) Ab105
MQYVEVPLT

SEQ ID NO: 2174 - protein, 8 aa, Artificial Sequence
  Synthetic: VHCDR1 (IMGT) Ab106
GFTFSSYA

SEQ ID NO: 2175 - protein, 8 aa, Artificial Sequence
  Synthetic: VHCDR2 (IMGT) Ab106
ISYDGSNK

SEQ ID NO: 2176 - protein, 17 aa, Artificial Sequence
  Synthetic: VHCDR3 (IMGT) Ab106
VRGAGRGFTLGPDGFDI

SEQ ID NO: 2177 - protein, 11 aa, Artificial Sequence
  Synthetic: VLCDR1 (IMGT) Ab106
RSLLWSDGKTY

SEQ ID NO: 2178 - protein, 3 aa, Artificial Sequence
  Synthetic: VLCDR2 (IMGT) Ab106
ELS

SEQ ID NO: 2179 - protein, 9 aa, Artificial Sequence
  Synthetic: VLCDR3 (IMGT) Ab106
MQYIEAPLT

SEQ ID NO: 2180 - protein, 8 aa, Artificial Sequence
  Synthetic: VHCDR1 (IMGT) Ab107
GFTFSSYA

SEQ ID NO: 2181 - protein, 8 aa, Artificial Sequence
  Synthetic: VHCDR2 (IMGT) Ab107
ISYDGSNK

SEQ ID NO: 2182 - protein, 17 aa, Artificial Sequence
  Synthetic: VHCDR3 (IMGT) Ab107
VRGAGRGFTLGPDGFDI

SEQ ID NO: 2183 - protein, 11 aa, Artificial Sequence
  Synthetic: VLCDR1 (IMGT) Ab107
RSLLWSDGKTY

SEQ ID NO: 2184 - protein, 3 aa, Artificial Sequence
  Synthetic: VLCDR2 (IMGT) Ab107
ELS

SEQ ID NO: 2185 - protein, 9 aa, Artificial Sequence
  Synthetic: VLCDR3 (IMGT) Ab107
MQYVEAPLT

SEQ ID NO: 2186 - protein, 8 aa, Artificial Sequence
  Synthetic: VHCDR1 (IMGT) Vh1
GFTFSSYA

SEQ ID NO: 2187 - protein, 8 aa, Artificial Sequence
  Synthetic: VHCDR2 (IMGT) Vh1
ISYDGSNK

SEQ ID NO: 2188 - protein, 17 aa, Artificial Sequence
  Synthetic: VHCDR3 (IMGT) Vh1
VRGAGRGYTYGPDGFDI

SEQ ID NO: 2189 - protein, 8 aa, Artificial Sequence
  Synthetic: VHCDR1 (IMGT) Vh2
GFTFSSYA

SEQ ID NO: 2190 - protein, 8 aa, Artificial Sequence
  Synthetic: VHCDR2 (IMGT) Vh2
ISYDGSNK

SEQ ID NO: 2191 - protein, 17 aa, Artificial Sequence
  Synthetic: VHCDR3 (IMGT) Vh2
ARGAGRGYTYGPDGFDI

SEQ ID NO: 2192 - protein, 11 aa, Artificial Sequence
  Synthetic: VLCDR1 (IMGT) Vk1
RSLLHSDGKTY

SEQ ID NO: 2193 - protein, 3 aa, Artificial Sequence
  Synthetic: VLCDR2 (IMGT) Vk1
ELS

SEQ ID NO: 2194 - protein, 9 aa, Artificial Sequence
  Synthetic: VLCDR3 (IMGT) Vk1
MQYIEAPLT

SEQ ID NO: 2195 - protein, 11 aa, Artificial Sequence
  Synthetic: VLCDR1 (IMGT) Vk2
RSLLHSDGKTY

SEQ ID NO: 2196 - protein, 3 aa, Artificial Sequence
  Synthetic: VLCDR2 (IMGT) Vk2
ELS

SEQ ID NO: 2197 - protein, 9 aa, Artificial Sequence
  Synthetic: VLCDR3 (IMGT) Vk2
MQYIEAPLT

SEQ ID NO: 2198 - protein, 11 aa, Artificial Sequence
  Synthetic: VLCDR1 (IMGT) Vk3
RSLLHSDGKTY

SEQ ID NO: 2199 - protein, 3 aa, Artificial Sequence
  Synthetic: VLCDR2 (IMGT) Vk3
ELS

SEQ ID NO: 2200 - protein, 9 aa, Artificial Sequence
  Synthetic: VLCDR3 (IMGT) Vk3
MQYIEAPLT

SEQ ID NO: 2201 - protein, 11 aa, Artificial Sequence
  Synthetic: VLCDR1 (IMGT) Vk4
RSLLHSDGKTY

SEQ ID NO: 2202 - protein, 3 aa, Artificial Sequence
  Synthetic: VLCDR2 (IMGT) Vk4
ELS

SEQ ID NO: 2203 - protein, 9 aa, Artificial Sequence
  Synthetic: VLCDR3 (IMGT) Vk4
MQYIEAPLT

SEQ ID NO: 2204 - protein, 11 aa, Artificial Sequence
  Synthetic: VLCDR1 (IMGT) Vk5
RSLLHSDGKTY

SEQ ID NO: 2205 - protein, 3 aa, Artificial Sequence
  Synthetic: VLCDR2 (IMGT) Vk5
ELS

SEQ ID NO: 2206 - protein, 9 aa, Artificial Sequence
  Synthetic: VLCDR3 (IMGT) Vk5
MQYIEAPLT

SEQ ID NO: 2207 - protein, 11 aa, Artificial Sequence
  Synthetic: VLCDR1 (IMGT) Vk6
QSLLHSDGKTY

SEQ ID NO: 2208 - protein, 3 aa, Artificial Sequence
  Synthetic: VLCDR2 (IMGT) Vk6
ELS

SEQ ID NO: 2209 - protein, 9 aa, Artificial Sequence
  Synthetic: VLCDR3 (IMGT) Vk6
MQYIEAPLT

SEQ ID NO: 2210 - protein, 11 aa, Artificial Sequence
  Synthetic: VLCDR1 (IMGT) Vk7
QSLLHSDGKTY

SEQ ID NO: 2211 - protein, 3 aa, Artificial Sequence
  Synthetic: VLCDR2 (IMGT) Vk7
ELS

SEQ ID NO: 2212 - protein, 9 aa, Artificial Sequence
  Synthetic: VLCDR3 (IMGT) Vk7
MQYIEAPLT

SEQ ID NO: 2213 - protein, 11 aa, Artificial Sequence
  Synthetic: VLCDR1 (IMGT) Vk8
RSLLHSDGKTY

SEQ ID NO: 2214 - protein, 3 aa, Artificial Sequence
  Synthetic: VLCDR2 (IMGT) Vk8
YLG

SEQ ID NO: 2215 - protein, 9 aa, Artificial Sequence
  Synthetic: VLCDR3 (IMGT) Vk8
MQYIEAPLT

SEQ ID NO: 2216 - protein, 11 aa, Artificial Sequence
  Synthetic: VLCDR1 (IMGT) Vk9
QSLLHSDGKTY

SEQ ID NO: 2217 - protein, 3 aa, Artificial Sequence
  Synthetic: VLCDR2 (IMGT) Vk9
ELS

SEQ ID NO: 2218 - protein, 9 aa, Artificial Sequence
  Synthetic: VLCDR3 (IMGT) Vk9
MQYIEAPLT

SEQ ID NO: 2219 - protein, 11 aa, Artificial Sequence
  Synthetic: VLCDR1 (IMGT) Vk10
RSLLHSDGKTY

SEQ ID NO: 2220 - protein, 3 aa, Artificial Sequence
  Synthetic: VLCDR2 (IMGT) Vk10
ELS

SEQ ID NO: 2221 - protein, 9 aa, Artificial Sequence
  Synthetic: VLCDR3 (IMGT) Vk10
MQYIEAPLT

SEQ ID NO: 2222 - protein, 11 aa, Artificial Sequence
  Synthetic: VLCDR1 (IMGT) Vk11
RSLLHSDGKTY

SEQ ID NO: 2223 - protein, 3 aa, Artificial Sequence
  Synthetic: VLCDR2 (IMGT) Vk11
ELS

SEQ ID NO: 2224 - protein, 9 aa, Artificial Sequence
  Synthetic: VLCDR3 (IMGT) Vk11
MQYIEAPLT

SEQ ID NO: 2225 - protein, 11 aa, Artificial Sequence
  Synthetic: VLCDR1 (IMGT) Vk12
RSLLHSDGKTY

SEQ ID NO: 2226 - protein, 3 aa, Artificial Sequence
  Synthetic: VLCDR2 (IMGT) Vk12
ELS

SEQ ID NO: 2227 - protein, 9 aa, Artificial Sequence
  Synthetic: VLCDR3 (IMGT) Vk12
MQYIEAPLT

SEQ ID NO: 2228 - protein, 11 aa, Artificial Sequence
  Synthetic: VLCDR1 (IMGT) Vk13
RSLLHSDGKTY

SEQ ID NO: 2229 - protein, 3 aa, Artificial Sequence
  Synthetic: VLCDR2 (IMGT) Vk13
ELS

SEQ ID NO: 2230 - protein, 9 aa, Artificial Sequence
  Synthetic: VLCDR3 (IMGT) Vk13
MQYIEAPLT

SEQ ID NO: 2231 - protein, 5 aa, Artificial Sequence
  Synthetic: Consensus #1 VHCDR1
  misc_feature (1)..(1): X can be any of these amino acids: SGHT
  misc_feature (2)..(2): X can be any of these amino acids: YH
  misc_feature (4)..(4): X can be any of these amino acids: MI
XXAXH

SEQ ID NO: 2232 - protein, 17 aa, Artificial Sequence
  Synthetic: Consensus #1 VHCDR2
  misc_feature (1)..(1): X can be any of these amino acids: VL
  misc_feature (8)..(8): X can be any of these amino acids: NE
  misc_feature (15)..(15): X can be any of these amino acids: VA
XISYDGSXKYYADSXKG

SEQ ID NO: 2233 - protein, 15 aa, Artificial Sequence
  Synthetic: Consensus #1 VHCDR3
  misc_feature (4)..(4): X can be any of these amino acids: RTLQHMI
  misc_feature (6)..(6): X can be any of these amino acids: YLFW
  misc_feature (7)..(7): X can be any of these amino acids: TPASIM
  misc_feature (8)..(8): X can be any of these amino acids: YNFHLWRK
GAGXGXXXGPDGDFI

SEQ ID NO: 2234 - protein, 16 aa, Artificial Sequence
  Synthetic: Consensus #1 VLCDR1
  misc_feature (1)..(1): X can be any of these amino acids: TRK
  misc_feature (4)..(4): X can be any of these amino acids: RQE
  misc_feature (7)..(7): X can be any of these amino acids: LVI
  misc_feature (8)..(8): X can be any of these amino acids: HWYF
  misc_feature (9)..(9): X can be any of these amino acids: SRGT
  misc_feature (12)..(12): X can be any of these amino acids: KNI
  misc_feature (15)..(15): X can be any of these amino acids: VL
  misc_feature (16)..(16): X can be any of these amino acids: YSN
XSSXSLXXXDGXTYXX

SEQ ID NO: 2235 - protein, 7 aa, Artificial Sequence
  Synthetic: Consensus #1 VLCDR2
  misc_feature (1)..(1): X can be any of these amino acids: EKQ
  misc_feature (2)..(2): X can be any of these amino acids: LVI
  misc_feature (4)..(4): X can be any of these amino acids: NS
XXSXRFS

SEQ ID NO: 2236 - protein, 9 aa, Artificial Sequence
  Synthetic: Consensus #1 VLCDR3
  misc_feature (3)..(3): X can be any of these amino acids: YA
  misc_feature (4)..(4): X can be any of these amino acids: IVTK
  misc_feature (5)..(5): X can be any of these amino acids: EQNR
  misc_feature (6)..(6): X can be any of these amino acids: AFL
  misc_feature (8)..(8): X can be any of these amino acids: LW
MQXXXXPXT

SEQ ID NO: 2237 - protein, 5 aa, Artificial Sequence
  Synthetic: Consensus #2 VHCDR1
  misc_feature (1)..(1): X can be any of these amino acids: SG
  misc_feature (4)..(4): X can be any of these amino acids: MI
XYAXH

SEQ ID NO: 2238 - protein, 17 aa, Artificial Sequence
  Synthetic: Consensus #2 VHCDR2
  misc_feature (1)..(1): X can be any of these amino acids: VL
  misc_feature (15)..(15): X can be any of these amino acids: VA
XISYDGSNKYYADSXKG

SEQ ID NO: 2239 - protein, 15 aa, Artificial Sequence
  Synthetic: Consensus #2 VHCDR3
  misc_feature (4)..(4): X can be any of these amino acids: RTLQHMI
  misc_feature (6)..(6): X can be any of these amino acids: YLFW
  misc_feature (7)..(7): X can be any of these amino acids: TPASIM
  misc_feature (8)..(8): X can be any of these amino acids: YNFHLWRK
GAGXGXXXGPDGDFI

SEQ ID NO: 2240 - protein, 16 aa, Artificial Sequence
  Synthetic: Consensus #2 VLCDR1
  misc_feature (1)..(1): X can be any of these amino acids: TRK
  misc_feature (4)..(4): X can be any of these amino acids: RQE
  misc_feature (7)..(7): X can be any of these amino acids: LV
  misc_feature (8)..(8): X can be any of these amino acids: HWY
  misc_feature (9)..(9): X can be any of these amino acids: SR
  misc_feature (12)..(12): X can be any of these amino acids: KN
  misc_feature (15)..(15): X can be any of these amino acids: VL
  misc_feature (16)..(16): X can be any of these amino acids: YS
XSSXSLXXXDGXTYXX

SEQ ID NO: 2241 - protein, 7 aa, Artificial Sequence
  Synthetic: Consensus #2 VLCDR2
  misc_feature (1)..(1): X can be any of these amino acids: EK
  misc_feature (2)..(2): X can be any of these amino acids: LV
XXSNRFS

SEQ ID NO: 2242 - protein, 9 aa, Artificial Sequence
  Synthetic: Consensus #2 VLCDR3
  misc_feature (3)..(3): X can be any of these amino acids: YA
  misc_feature (4)..(4): X can be any of these amino acids: IVT
  misc_feature (5)..(5): X can be any of these amino acids: EQ
  misc_feature (6)..(6): X can be any of these amino acids: AF
  misc_feature (8)..(8): X can be any of these amino acids: LW
MQXXXXPXT

SEQ ID NO: 2243 - protein, 5 aa, Artificial Sequence
  Synthetic: Consensus #3 VHCDR1
  misc_feature (1)..(1): X can be any of these amino acids: SG
XYAMH

SEQ ID NO: 2244 - protein, 17 aa, Artificial Sequence
  Synthetic: Consensus #3 VHCDR2
VISYDGSNKYYADSVKG

SEQ ID NO: 2245 - protein, 15 aa, Artificial Sequence
  Synthetic: Consensus #3 VHCDR3
  misc_feature (4)..(4): X can be any of these amino acids: RTLQHMI
  misc_feature (6)..(6): X can be any of these amino acids: YLFW
  misc_feature (7)..(7): X can be any of these amino acids: TPASIM
  misc_feature (8)..(8): X can be any of these amino acids: YNFHLWRK
GAGXGXXXGPDGDFI

SEQ ID NO: 2246 - protein, 16 aa, Artificial Sequence
  Synthetic: Consensus #3 VLCDR1
  misc_feature (1)..(1): X can be any of these amino acids: TRK
  misc_feature (4)..(4): X can be any of these amino acids: RQ
  misc_feature (8)..(8): X can be any of these amino acids: HW
  misc_feature (15)..(15): X can be any of these amino acids: VL
XSSXSLLXSDGKTYXY

SEQ ID NO: 2247 - protein, 7 aa, Artificial Sequence
  Synthetic: Consensus #3 VLCDR2
ELSNRFS

SEQ ID NO: 2248 - protein, 9 aa, Artificial Sequence
  Synthetic: Consensus #3 VLCDR3
  misc_feature (4)..(4): X can be any of these amino acids: IV
MQYXEAPLT

SEQ ID NO: 2249 - protein, 8 aa, Artificial Sequence
  Synthetic: Consensus #1 VHCDR1 (IMGT)
  misc_feature (3)..(3): X can be any of these amino acids: TSD
  misc_feature (5)..(5): X can be any of these amino acids: SGTA
  misc_feature (6)..(6): X can be any of these amino acids: SGHT
  misc_feature (7)..(7): X can be any of these amino acids: YH
GFXFXXXA

SEQ ID NO: 2250 - protein, 8 aa, Artificial Sequence
  Synthetic: Consensus #1 VHCDR2 (IMGT)
  misc_feature (7)..(7): X can be any of these amino acids: NE
ISYDGSXK

SEQ ID NO: 2251 - protein, 17 aa, Artificial Sequence
  Synthetic: Consensus #1 VHCDR3 (IMGT)
  misc_feature (6)..(6): X can be any of these amino acids: RTLQHMI
  misc_feature (8)..(8): X can be any of these amino acids: YLFW
  misc_feature (9)..(9): X can be any of these amino acids: TPASIM
  misc_feature (10)..(10): X can be any of these amino acids: YNFHLWRK
VRGAGXGXXXGPDGDFI

SEQ ID NO: 2252 - protein, 11 aa, Artificial Sequence
  Synthetic: Consensus #1 VLCDR1 (IMGT)
  misc_feature (1)..(1): X can be any of these amino acids: RQE
  misc_feature (4)..(4): X can be any of these amino acids: LVI
  misc_feature (5)..(5): X can be any of these amino acids: HWYF
  misc_feature (6)..(6): X can be any of these amino acids: SRGT
  misc_feature (9)..(9): X can be any of these amino acids: KNI
XSLXXXDGXTY

SEQ ID NO: 2253 - protein, 3 aa, Artificial Sequence
  Synthetic: Consensus #1 VLCDR2 (IMGT)
  misc_feature (1)..(1): X can be any of these amino acids: EKQ
  misc_feature (2)..(2): X can be any of these amino acids: LVI
XXS

SEQ ID NO: 2254 - protein, 9 aa, Artificial Sequence
  Synthetic: Consensus #1 VLCDR3 (IMGT)
  misc_feature (3)..(3): X can be any of these amino acids: YA
  misc_feature (4)..(4): X can be any of these amino acids: IVTK
  misc_feature (5)..(5): X can be any of these amino acids: EQNR
  misc_feature (6)..(6): X can be any of these amino acids: AFL
  misc_feature (8)..(8): X can be any of these amino acids: LW
MQXXXXPXT

SEQ ID NO: 2255 - protein, 8 aa, Artificial Sequence
  Synthetic: Consensus #2 VHCDR1 (IMGT)
  misc_feature (3)..(3): X can be any of these amino acids: TD
  misc_feature (5)..(5): X can be any of these amino acids: SA
  misc_feature (6)..(6): X can be any of these amino acids: SG
GFXFXXYA

SEQ ID NO: 2256 - protein, 8 aa, Artificial Sequence
  Synthetic: Consensus #2  VHCDR2 (IMGT)
ISYDGSNK

SEQ ID NO: 2257 - protein, 17 aa, Artificial Sequence
  Synthetic: Consensus #2 VHCDR3 (IMGT)
  misc_feature (6)..(6): X can be any of these amino acids: RTLQHMI
  misc_feature (8)..(8): X can be any of these amino acids: YLFW
  misc_feature (9)..(9): X can be any of these amino acids: TPASIM
  misc_feature (10)..(10): X can be any of these amino acids: YNFHLWRK
VRGAGXGXXXGPDGDFI

SEQ ID NO: 2258 - protein, 11 aa, Artificial Sequence
  Synthetic: Consensus #2 VLCDR1 (IMGT)
  misc_feature (1)..(1): X can be any of these amino acids: RQE
  misc_feature (4)..(4): X can be any of these amino acids: LV
  misc_feature (5)..(5): X can be any of these amino acids: HWY
  misc_feature (6)..(6): X can be any of these amino acids: SR
  misc_feature (9)..(9): X can be any of these amino acids: KN
XSLXXXDGXTY

SEQ ID NO: 2259 - protein, 3 aa, Artificial Sequence
  Synthetic: Consensus #2 VLCDR2 (IMGT)
  misc_feature (1)..(1): X can be any of these amino acids: EK
  misc_feature (2)..(2): X can be any of these amino acids: LV
XXS

SEQ ID NO: 2260 - protein, 9 aa, Artificial Sequence
  Synthetic: Consensus #2 VLCDR3 (IMGT)
  misc_feature (3)..(3): X can be any of these amino acids: YA
  misc_feature (4)..(4): X can be any of these amino acids: IVT
  misc_feature (5)..(5): X can be any of these amino acids: EQ
  misc_feature (6)..(6): X can be any of these amino acids: AF
  misc_feature (8)..(8): X can be any of these amino acids: LW
MQXXXXPXT

SEQ ID NO: 2261 - protein, 8 aa, Artificial Sequence
  Synthetic: Consensus #3 VHCDR1 (IMGT)
  misc_feature (3)..(3): X can be any of these amino acids: TD
  misc_feature (5)..(5): X can be any of these amino acids: SA
  misc_feature (6)..(6): X can be any of these amino acids: SG
GFXFXXYA

SEQ ID NO: 2262 - protein, 8 aa, Artificial Sequence
  Synthetic: Consensus #3 VHCDR2 (IMGT)
ISYDGSNK

SEQ ID NO: 2263 - protein, 17 aa, Artificial Sequence
  Synthetic: Consensus #3 VHCDR3 (IMGT)
  misc_feature (6)..(6): X can be any of these amino acids: RTLQHMI
  misc_feature (8)..(8): X can be any of these amino acids: YLFW
  misc_feature (9)..(9): X can be any of these amino acids: TPASIM
  misc_feature (10)..(10): X can be any of these amino acids: YNFHLWRK
VRGAGXGXXXGPDGDFI

SEQ ID NO: 2264 - protein, 11 aa, Artificial Sequence
  Synthetic: Consensus #3 VLCDR1 (IMGT)
  misc_feature (1)..(1): X can be any of these amino acids: RQ
  misc_feature (5)..(5): X can be any of these amino acids: HW
XSLLXSDGKTY

SEQ ID NO: 2265 - protein, 3 aa, Artificial Sequence
  Synthetic: Consensus #3 VLCDR2 (IMGT)
ELS

SEQ ID NO: 2266 - protein, 9 aa, Artificial Sequence
  Synthetic: Consensus #3 VLCDR3 (IMGT)
  misc_feature (4)..(4): X can be any of these amino acids: IV
MQYXEAPLT

SEQ ID NO: 2267 - protein, 127 aa, Artificial Sequence
  Synthetic: Figure 2  Consensus 1
EVQLVESGGGVVQPGRSLRLSCAASGFTFSSYAMHWVRQAPGKGLEWVAVISYDGSNKYYADSVKGRFTISRDNSKNTLYLQMNSLRVEDTAIYYCVRGAGRGYTYGPDGFDIWGQGTMVTVSSAST

SEQ ID NO: 2268 - protein, 123 aa, Artificial Sequence; identical to SEQ ID NO: 150
  Synthetic: Figure 2  Consensus 2

1. An antibody, or antigen-binding portion thereof, which binds to human FGFR1c, FGFR2c, FGFR3c, and/or FGFR4.

2. The antibody, or antigen-binding portion thereof, of claim 1, which does not bind to FGFR1b, FGFR2b, and/or FGFR3b.

3. The antibody, or antigen-binding portion thereof, of claim 1, wherein the antibody inhibits the binding of FGF1 and/or FGF2 to FGFR1c, FGFR2c, FGFR3c, and/or FGFR4.

4-11. (canceled)

12. An isolated monoclonal antibody, or antigen-binding portion thereof, which specifically binds to FGFR1c, FGFR2c, FGFR3c, and/or FGFR4, and comprises the three heavy chain CDRs and the three light chain CDRs that are in the heavy and light chain variable region pairs selected from the group consisting of: SEQ ID NOs: 29 and 30; 40 and 41; 51 and 52; 62 and 63; 73 and 74; 84 and 85; 95 and 96; 106 and 107; 117 and 118; 128 and 129; 139 and 140;
150 and 151; 161 and 162; 172 and 173; 183 and 184; 194 and 195; 204 and 205; 214 and 215;
224 and 225; 234 and 235; 244 and 245; 254 and 255; 264 and 265; 274 and 275; 284 and 285;
294 and 295; 304 and 305; 314 and 315; 324 and 325; 334 and 335; 344 and 345; 354 and 355;
364 and 365; 374 and 375; 384 and 385; 394 and 395; 404 and 405; 414 and 415; 424 and 425;
434 and 435; 444 and 445; 454 and 455; 464 and 465; 474 and 475; 484 and 485; 494 and 495;
504 and 505; 514 and 515; 524 and 525; 534 and 535; 544 and 545; 554 and 555; 564 and 565;
574 and 575; 584 and 585; 594 and 595; 604 and 605; 614 and 615; 624 and 625; 634 and 635;
644 and 645; 654 and 655; 664 and 665; 674 and 675; 684 and 685; 694 and 695; 704 and 705;
714 and 715; 724 and 725; 734 and 735; 744 and 745; 754 and 755; 764 and 765; 774 and 775;
784 and 785; 794 and 795; 804 and 805; 814 and 815; 824 and 825; 834 and 835; 844 and 845; 854 and 855; 864 and 865; 874 and 875; 884 and 885; 894 and 895; 904 and 905; 914 and 915; 924 and 925; 934 and 935; 944 and 945; 954 and 955; 964 and 965; 974 and 975; 984 and 985; 994 and 995; 1004 and 1005; 1014 and 1015; 1024 and 1025; 1034 and 1035; 1044 and 1045; 1054 and 1055; 1064 and 1065; 1074 and 1075; 1084 and 1085; 1094 and 1095; and 1104 and 1105.

13-36. (canceled)

37. An isolated monoclonal antibody, or antigen binding portion thereof, which binds to FGFR1c, FGFR2c, FGFR3c, and/or FGFR4, and comprises heavy and light chain variable region sequences which are at least 90%, 95%, 98%, 99%, or 100% identical to the amino acid sequences selected from the group consisting of: SEQ ID NOs: 29 and 30; 40 and 41; 51 and 52; 62 and 63; 73 and 74; 84 and 85; 95 and 96; 106 and 107; 117 and 118; 128 and 129; 139 and 140; 150 and 151; 161 and 162; 172 and 173; 183 and 184; 194 and 195; 204 and 205; 214 and 215; 224 and 225; 234 and 235; 244 and 245; 254 and 255; 264 and 265; 274 and 275; 284 and 285; 294 and 295; 304 and 305; 314 and 315; 324 and 325; 334 and 335; 344 and 345; 354 and 355; 364 and 365; 374 and 375; 384 and 385; 394 and 395; 404 and 405; 414 and 415; 424 and 425; 434 and 435; 444 and 445; 454 and 455; 464 and 465; 474 and 475; 484 and 485; 494 and 495; 504 and 505; 514 and 515; 524 and 525; 534 and 535; 544 and 545; 554 and 555; 564 and 565; 574 and 575; 584 and 585; 594 and 595; 604 and 605; 614 and 615; 624 and 625; 634 and 635; 644 and 645; 654 and 655; 664 and 665; 674 and 675; 684 and 685; 694 and 695; 704 and 705; 714 and 715; 724 and 725; 734 and 735; 744 and 745; 754 and 755; 764 and 765; 774 and 775; 784 and 785; 794 and 795; 804 and 805; 814 and 815; 824 and 825; 834 and 835; 844 and 845; 854 and 855; 864 and 865; 874 and 875; 884 and 885; 894 and 895; 904 and 905; 914 and 915; 924 and 925; 934 and 935; 944 and 945; 954 and 955; 964 and 965; 974 and 975; 984 and 985; 994 and 995; 1004 and 1005; 1014 and 1015; 1024 and 1025; 1034 and 1035; 1044 and 1045; 1054 and 1055; 1064 and 1065; 1074 and 1075; 1084 and 1085; 1094 and 1095; and 1104 and 1105.

38. (canceled)

39. An isolated monoclonal antibody, or antigen binding portion thereof, which binds to FGFR1c, FGFR2c, FGFR3c, and/or FGFR4, and comprises heavy and light chain sequences which are at least 90%, 95%, 98%, 99%, or 100% identical to the amino acid sequences selected from the group consisting of: SEQ ID NOs: 32 and 33; 43 and 44; 54 and 55; 65 and 66; 76 and 77; 87 and 88; 98 and 99; 109 and 110; 120 and 121; 131 and 132; 142 and 143; 153 and 154; 164 and 165; 175 and 176; 186 and 187; 196 and 197; 206 and 207; 216 and 217; 226 and 227; 236 and 237; 246 and 247; 256 and 257; 266 and 267; 276 and 277; 286 and 287; 296 and 297; 306 and 307; 316 and 317; 326 and 327; 336 and 337; 346 and 347; 356 and 357; 366 and 367; 376 and 377; 386 and 387; 396 and 397; 406 and 407; 416 and 417; 426 and 427; 436 and 437; 446 and 447; 456 and 457; 466 and 467; 476 and 477; 486 and 487; 496 and 497; 506 and 507; 516 and 517; 526 and 527; 536 and 537; 546 and 547; 556 and 557; 566 and 567; 576 and 577; 586 and 587; 596 and 597; 606 and 607; 616 and 617; 626 and 627; 636 and 637; 646 and 647; 656 and 657; 666 and 667; 676 and 677; 686 and 687; 696 and 697; 706 and 707; 716 and 717; 726 and 727; 736 and 737; 746 and 747; 756 and 757; 766 and 767; 776 and 777; 786 and 787; 796 and 797; 806 and 807; 816 and 817; 826 and 827; 836 and 837; 846 and 847; 856 and 857; 866 and 867; 876 and 877; 886 and 887; 896 and 897; 906 and 907; 916 and 917; 926 and 927; 936 and 937; 946 and 947; 956 and 957; 966 and 967; 976 and 977; 986 and 987; 996 and 997; 1006 and 1007; 1016 and 1017; 1026 and 1027; 1036 and 1037; 1046 and 1047; 1056 and 1057; 1066 and 1067; 1076 and 1077; 1086 and 1087; 1096 and 1097; and 1106 and 1107.

40-42. (canceled)

43. An isolated monoclonal antibody, or antigen-binding portion thereof, which specifically binds to FGFR1c, FGFR2c, FGFR3c, and/or FGFR4, and comprises heavy chain CDR1, CDR2, and CDR3 sequences [SGHT][YH]A[MI]H (SEQ ID NO: 2231), [VL]ISYDGS[NE]KYYADS[VA]KG (SEQ ID NO: 2232), and GAG[RTLQHMI]G[YLFW][TPASIM][YNFHLWRK]GPDGDFI (SEQ ID NO: 2233), respectively, and light chain CDR1, CDR2, and CDR3 sequences [TRK]SS[RQE]SL[LVI][HWYF][SRGT]DG[KNI]TY[VL][YSN] (SEQ ID NO: 2234), [EKQ][LVI]S[NS]RFS (SEQ ID NO: 2235), and MQ[YA][IVTK][EQNR][AFL]P[LW]T (SEQ ID NO: 2236), respectively.

44-45. (canceled)

46. An isolated monoclonal antibody, or antigen-binding portion thereof, which specifically binds to FGFR1c, FGFR2c, FGFR3c, and/or FGFR4, and comprises IMGT heavy chain CDR1, CDR2, and CDR3 sequences GF[TSD]F[SGTA][SGHT][YH]A (SEQ ID NO: 2249), ISYDGS[NE]K (SEQ ID NO: 2250), and VRGAG[RTLQHMI]G[YLFW][TPASIM][YNFHLWRK]GPDGDFI (SEQ ID NO: 2251), respectively, and IMGT light chain CDR1, CDR2, and CDR3 sequences [RQE]SL[LVI][HWYF][SRGT]DG[KNI]TY (SEQ ID NO: 2252), [EKQ][LVI]S (SEQ ID NO: 2253), and MQ[YA][IVTK][EQNR][AFL]P[LW]T (SEQ ID NO: 2254), respectively.

47-49. (canceled)

50. The antibody, or antigen-binding portion thereof, of claim 1, wherein the antibody is an IgG1, an IgG2, an IgG3, an IgG4, or a variant thereof.

51-53. (canceled)

54. The antibody of claim 50, wherein the antibody comprises an Fc region with reduced or no effector function.

55. The antibody of claim 1, wherein the antibody is a human antibody.

56. (canceled)

57. A modified antibody that binds to FGFR1c, wherein the antibody exhibits increased tolerability as compared to an antibody comprising identical heavy and light chain variable region sequences and an IgG1 constant region when administered to a mammal.

58. A modified antibody that binds to FGFR1c, wherein administration of the antibody to a mammal does not result in significant weight loss.

59-65. (canceled)

66. A multispecific molecule comprising the antibody of claim 1 linked to a molecule having a further binding specificity for a target molecule which is not a FGF receptor.

67. A nucleic acid encoding the heavy and/or light chain variable region of the antibody, or antigen-binding portion thereof, of claim 1.

68. An expression vector comprising the nucleic acid molecule of claim 67.

69. A cell transformed with an expression vector of claim 68.

70. An immunoconjugate comprising the antibody, or antigen-binding portion thereof, of claim 1, linked to a binding moiety, a labeling moiety, a biologically active moiety, or a therapeutic agent.

71. A composition comprising the antibody, or antigen-binding portion thereof, of claim 1.

72. (canceled)

73. A kit comprising the antibody, or antigen-binding portion thereof, of claim 1, and instructions for use.

74. A method of preparing an anti-FGFR antibody, or antigen binding portion thereof, comprising expressing the antibody, or antigen binding portion thereof, in the cell of claim 69 and isolating the antibody, or antigen binding portion thereof, from the cell.

75. A method of blocking FGF1 or FGF2 binding to FGFR1c, FGFR2c, FGFR3c, and/or FGFR4 in a cell comprising contacting the cell with an effective amount of the antibody, or antigen-binding portion thereof, of claim 1.

76-77. (canceled)

78. A method of inhibiting FGF-mediated signaling in a cell comprising contacting the cell with an effective amount of the antibody, or antigen-binding portion thereof, of claim 1.

79-80. (canceled)

81. A method of inhibiting the growth of tumor cells comprising administering to a subject -with a tumor a therapeutically effective amount of an antibody, or antigen-binding portion, of claim 1.

82-83. (canceled)

84. A method of treating cancer comprising administering to a subject in need thereof a therapeutically effective amount of the antibody, or antigen-binding portion, of claim 1.

85-97. (canceled)

98. A method of detecting the presence of FGFR (e.g., FGFR1c, FGFR2c, FGFR3c, and/or FGFR4) in a sample comprising contacting the sample with the anti-FGFR antibody of claim 1 under conditions that allow for formation of a complex between the antibody and FGFR protein, and detecting the formation of a complex.
